(19) United States
(12) Patent Application Publication
(10) Pub. No.: US 2003/0077606 A1
(43) Pub. Date: Apr. 24, 2003

(54) Nucleic acids, proteins, and antibodies

(75) Inventors: Craig A. Rosen, Laytonsville, MD (US); Steven M. Ruben, Olney, MD (US); Steven C. Barash, Rockville, MD (US)

Correspondence Address: HUMAN GENOME SCIENCES INC, 9410 KEY WEST AVENUE, ROCKVILLE, MD, 20850

(73) Assignee: Human Genome Sciences, Inc., Rockville, MD

(21) Appl. No.: 10/091,438

(22) Filed: Mar. 7, 2002

Related U.S. Application Data
(63) Continuation of application No. 09/764,879, filed on Jan. 17, 2001, now abandoned.
(60) Provisional application No. 60/179,065, filed on Jan. 31, 2000.
(60) Provisional application No. 60/180,628, filed on Feb. 4, 2000.
(60) Provisional application No. 60/214,886, filed on Jun. 28, 2000.
(60) Provisional application No. 60/217,487, filed on Jul. 11, 2000.
(60) Provisional application No. 60/225,758, filed on Aug. 14, 2000.
(60) Provisional application No. 60/220,963, filed on Jul. 26, 2000.
(60) Provisional application No. 60/217,496, filed on Jul. 11, 2000.
(60) Provisional application No. 60/225,447, filed on Aug. 14, 2000.
(60) Provisional application No. 60/218,290, filed on Jul. 14, 2000.
(60) Provisional application No. 60/225,757, filed on Aug. 14, 2000.
(60) Provisional application No. 60/226,868, filed on Aug. 22, 2000.
(60) Provisional application No. 60/216,647, filed on Jul. 7, 2000.
(60) Provisional application No. 60/225,267, filed on Aug. 14, 2000.
(60) Provisional application No. 60/216,880, filed on Jul. 7, 2000.
(60) Provisional application No. 60/225,270, filed on Aug. 14, 2000.
(60) Provisional application No. 60/251,869, filed on Dec. 8, 2000.
(60) Provisional application No. 60/235,834, filed on Sep. 27, 2000.
(60) Provisional application No. 60/234,274, filed on Sep. 21, 2000.
(60) Provisional application No. 60/234,223, filed on Sep. 21, 2000.
(60) Provisional application No. 60/228,924, filed on Aug. 30, 2000.
(60) Provisional application No. 60/224,518, filed on Aug. 14, 2000.
(60) Provisional application No. 60/236,369, filed on Sep. 29, 2000.
(60) Provisional application No. 60/224,519, filed on Aug. 14, 2000.
(60) Provisional application No. 60/220,964, filed on Jul. 26, 2000.
(60) Provisional application No. 60/241,809, filed on Oct. 20, 2000.
(60) Provisional application No. 60/249,299, filed on Nov. 17, 2000.
(60) Provisional application No. 60/236,327, filed on Sep. 29, 2000.
(60) Provisional application No. 60/241,785, filed on Oct. 20, 2000.
(60) Provisional application No. 60/244,617, filed on Nov. 1, 2000.
(60) Provisional application No. 60/225,268, filed on Aug. 14, 2000.
(60) Provisional application No. 60/236,368, filed on Sep. 29, 2000.
(60) Provisional application No. 60/251,856, filed on Dec. 8, 2000.
(60) Provisional application No. 60/251,868, filed on Dec. 8, 2000.
(60) Provisional application No. 60/229,344, filed on Sep. 1, 2000.
(60) Provisional application No. 60/234,997, filed on Sep. 25, 2000.
(60) Provisional application No. 60/229,343, filed on Sep. 1, 2000.
(60) Provisional application No. 60/229,345, filed on Sep. 1, 2000.
(60) Provisional application No. 60/229,287, filed on Sep. 1, 2000.
(60) Provisional application No. 60/229,513, filed on Sep. 5, 2000.
(60) Provisional application No. 60/231,413, filed on Sep. 8, 2000.
(60) Provisional application No. 60/229,509, filed on Sep. 5, 2000.
(60) Provisional application No. 60/236,367, filed on Sep. 29, 2000.
(60) Provisional application No. 60/237,039, filed on Oct. 2, 2000.
(60) Provisional application No. 60/237,038, filed on Oct. 2, 2000.
(60) Provisional application No. 60/236,370, filed on Sep. 29, 2000.
(60) Provisional application No. 60/236,802, filed on Oct. 2, 2000.
(60) Provisional application No. 60/237,037, filed on Oct. 2, 2000.
(60) Provisional application No. 60/237,040, filed on Oct. 2, 2000.
(60) Provisional application No. 60/240,960, filed on Oct. 20, 2000.
(60) Provisional application No. 60/239,935, filed on Oct. 13, 2000.
(60) Provisional application No. 60/239,937, filed on Oct. 13, 2000.
(60) Provisional application No. 60/241,787, filed on Oct. 20, 2000.
(60) Provisional application No. 60/246,474, filed on Nov. 8, 2000.
(60) Provisional application No. 60/246,532, filed on Nov. 8, 2000.
(60) Provisional application No. 60/249,216, filed on Nov. 17, 2000.
(60) Provisional application No. 60/249,210, filed on Nov. 17, 2000.
(60) Provisional application No. 60/226,681, filed on Aug. 22, 2000.
(60) Provisional application No. 60/225,759, filed on Aug. 14, 2000.
(60) Provisional application No. 60/225,213, filed on Aug. 14, 2000.
(60) Provisional application No. 60/227,182, filed on Aug. 22, 2000.
(60) Provisional application No. 60/225,214, filed on Aug. 14, 2000.
(60) Provisional application No. 60/235,836, filed on Sep. 27, 2000.
(60) Provisional application No. 60/230,438, filed on Sep. 6, 2000.
(60) Provisional application No. 60/215,135, filed on Jun. 30, 2000.
(60) Provisional application No. 60/225,266, filed on Aug. 14, 2000.
(60) Provisional application No. 60/249,218, filed on Nov. 17, 2000.
(60) Provisional application No. 60/249,208, filed on Nov. 17, 2000.
(60) Provisional application No. 60/249,213, filed on Nov. 17, 2000.
(60) Provisional application No. 60/249,212, filed on Nov. 17, 2000.
(60) Provisional application No. 60/249,207, filed on Nov. 17, 2000.
(60) Provisional application No. 60/249,245, filed on Nov. 17, 2000.
(60) Provisional application No. 60/249,244, filed on Nov. 17, 2000.
(60) Provisional application No. 60/249,217, filed on Nov. 17, 2000.
(60) Provisional application No. 60/249,211, filed on Nov. 17, 2000.
(60) Provisional application No. 60/249,215, filed on Nov. 17, 2000.
(60) Provisional application No. 60/249,264, filed on Nov. 17, 2000.
(60) Provisional application No. 60/249,214, filed on Nov. 17, 2000.
(60) Provisional application No. 60/249,297, filed on Nov. 17, 2000.
(60) Provisional application No. 60/232,400, filed on Sep. 14, 2000.
(60) Provisional application No. 60/231,242, filed on Sep. 8, 2000.
(60) Provisional application No. 60/232,081, filed on Sep. 8, 2000.
(60) Provisional application No. 60/232,080, filed on Sep. 8, 2000.
(60) Provisional application No. 60/231,414, filed on Sep. 8, 2000.
(60) Provisional application No. 60/231,244, filed on Sep. 8, 2000.
(60) Provisional application No. 60/233,064, filed on Sep. 14, 2000.
(60) Provisional application No. 60/233,063, filed on Sep. 14, 2000.
(60) Provisional application No. 60/232,397, filed on Sep. 14, 2000.
(60) Provisional application No. 60/232,399, filed on Sep. 14, 2000.
(60) Provisional application No. 60/232,401, filed on Sep. 14, 2000.
(60) Provisional application No. 60/241,808, filed on Oct. 20, 2000.
(60) Provisional application No. 60/241,826, filed on Oct. 20, 2000.
(60) Provisional application No. 60/241,786, filed on Oct. 20, 2000.
(60) Provisional application No. 60/241,221, filed on Oct. 20, 2000.
(60) Provisional application No. 60/246,475, filed on Nov. 8, 2000.
(60) Provisional application No. 60/231,243, filed on Sep. 8, 2000.
(60) Provisional application No. 60/233,065, filed on Sep. 14, 2000.
(60) Provisional application No. 60/232,398, filed on Sep. 14, 2000.
(60) Provisional application No. 60/234,998, filed on Sep. 25, 2000.
(60) Provisional application No. 60/246,477, filed on Nov. 8, 2000.
(60) Provisional application No. 60/246,528, filed on Nov. 8, 2000.
(60) Provisional application No. 60/246,525, filed on Nov. 8, 2000.
(60) Provisional application No. 60/246,476, filed on Nov. 8, 2000.
(60) Provisional application No. 60/246,526, filed on Nov. 8, 2000.
(60) Provisional application No. 60/249,209, filed on Nov. 17, 2000.
(60) Provisional application No. 60/246,527, filed on Nov. 8, 2000.
(60) Provisional application No. 60/246,523, filed on Nov. 8, 2000.
(60) Provisional application No. 60/246,524, filed on Nov. 8, 2000.
(60) Provisional application No. 60/246,478, filed on Nov. 8, 2000.
(60) Provisional application No. 60/246,609, filed on Nov. 8, 2000.
(60) Provisional application No. 60/246,613, filed on Nov. 8, 2000.
(60) Provisional application No. 60/249,300, filed on Nov. 17, 2000.
(60) Provisional application No. 60/249,265, filed on Nov. 17, 2000.
(60) Provisional application No. 60/246,610, filed on Nov. 8, 2000.
(60) Provisional application No. 60/246,611, filed on Nov. 8, 2000.
(60) Provisional application No. 60/230,437, filed on Sep. 6, 2000.
(60) Provisional application No. 60/251,990, filed on Dec. 8, 2000.
(60) Provisional application No. 60/251,988, filed on Dec. 5, 2000.
(60) Provisional application No. 60/251,030, filed on Dec. 5, 2000.
(60) Provisional application No. 60/251,479, filed on Dec. 6, 2000.
(60) Provisional application No. 60/256,719, filed on Dec. 5, 2000.
(60) Provisional application No. 60/250,160, filed on Dec. 1, 2000.
(60) Provisional application No. 60/251,989, filed on Dec. 8, 2000.
(60) Provisional application No. 60/250,391, filed on Dec. 1, 2000.
(60) Provisional application No. 60/254,097, filed on Dec. 11, 2000.
(60) Provisional application No. 60/231,968, filed on Sep. 12, 2000.
(60) Provisional application No. 60/226,279, filed on Aug. 18, 2000.
(60) Provisional application No. 60/186,350, filed on Mar. 2, 2000.
(60) Provisional application No. 60/184,664, filed on Feb. 24, 2000.
(60) Provisional application No. 60/189,874, filed on Mar. 16, 2000.
(60) Provisional application No. 60/198,123, filed on Apr. 18, 2000.
(60) Provisional application No. 60/227,009, filed on Aug. 23, 2000.
(60) Provisional application No. 60/235,484, filed on Sep. 26, 2000.
(60) Provisional application No. 60/190,076, filed on Mar. 17, 2000.
(60) Provisional application No. 60/209,467, filed on Jun. 7, 2000.
(60) Provisional application No. 60/205,515, filed on May 19, 2000.
(60) Provisional application No. 60/259,678, filed on Jan. 5, 2001.

(51) Int. Cl. C12Q 1/68; C07H 21/04; C12N 9/00; C12P 21/02; C12N 5/06

(52) U.S. Cl. 435/6; 435/69.1; 435/183; 435/325; 435/320.1; 536/23.2

(57) ABSTRACT

The present invention relates to novel proteins. More specifically, isolated nucleic acid molecules are provided encoding novel polypeptides. Novel polypeptides and antibodies that bind to these polypeptides are provided. Also provided are vectors, host cells, and recombinant and synthetic methods for producing human polynucleotides and/or polypeptides, and antibodies. The invention further relates to diagnostic and therapeutic methods useful for diagnosing, treating, preventing and/or prognosing disorders related to these novel polypeptides. The invention further relates to screening methods for identifying agonists and antagonists of polynucleotides and polypeptides of the invention. The present invention further relates to methods and/or compositions for inhibiting or enhancing the production and function of the polypeptides of the present invention.

### Statement under 37 C.F.R. § 1.77(b)(4)

[0001] This application refers to a “Sequence Listing” listed below, which is provided as an electronic document on two identical compact discs (CD-R), labeled “Copy 1” and “Copy 2.” These compact discs each contain the file “PTZ17C1_seqList.txt” (788,255 bytes, created on Mar. 6, 2002), which is hereby incorporated in its entirety herein.

[0002] The Sequence Listing may be viewed on an IBM-PC machine running the MS-Windows operating system.

### FIELD OF THE INVENTION

[0003] The present invention relates to novel proteins. More specifically, isolated nucleic acid molecules are provided encoding novel polypeptides. Novel polypeptides and antibodies that bind to these polypeptides are provided. Also provided are vectors, host cells, and recombinant and synthetic methods for producing human polynucleotides and/or polypeptides, and antibodies. The invention further relates to diagnostic and therapeutic methods useful for diagnosing, treating, preventing and/or prognosing disorders related to these novel polypeptides. The invention further relates to screening methods for identifying agonists and antagonists of polynucleotides and polypeptides of the invention. The present invention further relates to methods and/or compositions for inhibiting or enhancing the production and function of the polypeptides of the present invention.

### BACKGROUND OF THE INVENTION

[0004] The Immunoglobulin (Ig) Superfamily of proteins consists of diverse families of proteins involved in cell-cell interactions, cell-surface recognition, intercellular communication, and immune and inflammatory responses. Members of this superfamily of proteins include molecules such as Cell Adhesion Molecules (CAMs), CD4, CD8, CD28, CD3, and T-cell receptor, for example.

[0005] Neural CAMs are thought to play important roles in axonal growth and guidance. Intercellular adhesion molecules (ICAMs), Vascular adhesion molecule-1 (VCAM-1), and Mucosal addressin cell adhesion molecule-1 (MAdCAM-1) are all thought to be involved in binding to integrins of leukocyte surfaces, thus facilitating the immune response to infection and injury (Wang, J., and T. A. Springer, Immun. Reviews, 163:197-215 (1998)).

[0006] Members of the Ig Superfamily of proteins are defined as molecules that share domains of sequence similarity with the variable or constant domains of antibodies. Many Ig superfamily proteins consist of multiple tandem Ig-like domains connected to other domains, such as Fn-III repeat domains (Vaughn, D. E., and P. J. Bjorkman, Neuron, 16:261-73 (1996)).

[0007] At the primary structural level, traditional Ig-like domains can be identified by the presence of two cysteine residues separated by approximately 55-75 amino acid residues, and an “invariant” tryptophan residue located 10-15 residues C-terminal to the first of the two conserved cysteine residues. The two conserved cysteine residues are thought to be involved in disulfide bonding to form the folded Ig structures (Vaughn, D. E., (1996)).

[0008] Ig-like domains further share a common folding pattern, that of a sandwich or fold structure of two β-sheets consisting of antiparallel β-strands containing 5-10 amino acids (Huang, Z., et al., Biopolymers, 43:367-82 (1997)). Ig-like domains are divided, based upon sequence and structural similarities, into four classifications known as C1, C2, I and V-like domains. The C1 (or constant) domain consists of seven β strands arranged into two antiparallel sheets connected by disulfide bonds. C1 domains are typically found in antibody, T-cell receptor, and MHC molecules (Wang, J., (1998)).

[0009] The C2 domain is structurally similar to the C1 domain, except that C2 domains lack many of the conserved sequence patterns at the N-terminal end of the β barrel seen in the C1 domain. C2 domains are typically found in adhesion molecules (Wang, J., (I998)).

[0010] The V-like domain is also structurally similar to the C1 domain, except that the V-like domain contains an additional two β strands (Vaughn, D. E., (1996)). The V-like domain is also the largest of the Ig-like domains. The I domains have a topology intermediate between the V-like domain and the C domains, and are found in muscle proteins (Wang, J., (1998)).

[0011] The functional determinants of the Ig-like domains are presented on the faces of β-sheets or the loop regions of the Ig-fold. Accordingly, protein-protein interactions can occur either between the faces of the β-sheets, or the loop regions of the Ig-fold (Huang, Z., (1998)). These Ig-like domains are involved in mediating a diversity of biological functions such as intermolecular binding and protein-protein homophilic or heterophilic interactions. Thus, Ig-like domains play an integral role in facilitating the activities of proteins of the Ig superfamily.

[0012] Thus there exists a clear need for identifying and exploiting novel members of the Immunoglobulin superfamily of proteins. Although structurally related, such proteins may possess diverse and multifaceted functions in a variety of cell and tissue types. Immunoglobulin proteins should prove useful in target based screens for small molecules and other such pharmacologically valuable factors that function as agonists and/or antagonists to the activity of the immunoglobulin proteins of the invention. The purified Immunoglobulin proteins of the invention are research tools useful for the identification, characterization and purification of additional interacting proteins or receptor proteins, or other signal transduction pathway proteins that interact with the immunoglobulin proteins of the invention. Additionally, assays designed to monitor the expression of immunoglobulin proteins may be useful as diagnostic tools to monitor the presence or progression of certain types of diseases, such as neurological diseases.

### SUMMARY OF THE INVENTION

[0013] The present invention relates to novel proteins. More specifically, isolated nucleic acid molecules are provided encoding novel polypeptides. Novel polypeptides and antibodies that bind to these polypeptides are provided. Also provided are vectors, host cells, and recombinant and synthetic methods for producing human polynucleotides and/or polypeptides, and antibodies. The invention further relates to diagnostic and therapeutic methods useful for diagnosing, treating, preventing and/or prognosing disorders related to these novel polypeptides. The invention further relates to screening methods for identifying agonists and antagonists of polynucleotides and polypeptides of the invention. The present invention further relates to methods and/or compositions for inhibiting or enhancing the production and function of the polypeptides of the present invention.

### DETAILED DESCRIPTION

[0014] Tables

[0015] Table 1A summarizes some of the polynucleotides encompassed by the invention (including cDNA clones related to the sequences (Clone ID NO:Z), contig sequences (contig identifier (Contig ID:) and contig nucleotide sequence identifier (SEQ ID NO:X)) and further summarizes certain characteristics of these polynucleotides and the polypeptides encoded thereby. The first column provides the gene number in the application for each clone identifier. The second column provides a unique clone identifier, “Clone ID NO:Z”, for a cDNA clone related to each contig sequence disclosed in Table 1A. The third column provides a unique contig identifier, “Contig ID:” for each of the contig sequences disclosed in Table 1A. The fourth column provides the sequence identifier, “SEQ ID NO:X”, for each of the contig sequences disclosed in Table 1A. The fifth column, “ORF (From-To)”, provides the location (i.e., nucleotide position numbers) within the polynucleotide sequence of SEQ ID NO:X that delineate the preferred open reading frame (ORF) that encodes the amino acid sequence shown in the sequence listing and referenced in Table 1A as SEQ ID NO:Y (column 6). Column 7 lists residues comprising predicted epitopes contained in the polypeptides encoded by each of the preferred ORFs (SEQ ID NO:Y). Identification of potential immunogenic regions was performed according to the method of Jameson and Wolf (CABIOS, 4; 181-186 (1988)); specifically, the Genetics Computer Group (GCG) implementation of this algorithm, embodied in the program PEPTIDESTRUCTURE (Wisconsin Package v10.0, Genetics Computer Group (GCG), Madison, Wis.). This method returns a measure of the probability that a given residue is found on the surface of the protein. Regions where the antigenic index score is greater than 0.9 over at least 6 amino acids are indicated in Table 1A as “Predicted Epitopes”. In particular embodiments, polypeptides of the invention comprise, or alternatively consist of, one, two, three, four, five or more of the predicted epitopes described in Table 1A. It will be appreciated that depending on the analytical criteria used to predict antigenic determinants, the exact address of the determinant may vary slightly. Column 8, “Tissue Distribution” shows the expression profile of tissue, cells, and/or cell line libraries which express the polynucleotides of the invention. The first number in column 8 (preceding the colon), represents the tissue/cell source identifier code corresponding to the key provided in Table 4. Expression of these polynucleotides was not observed in the other tissues and/or cell libraries tested. For those identifier codes in which the first two letters are not “AR”, the second number in column 8 (following the colon), represents the number of times a sequence corresponding to the reference polynucleotide sequence (e.g., SEQ ID NO:X) was identified in the tissue/cell source. Those tissue/cell source identifier codes in which the first two letters are “AR” designate information generated using DNA array technology. Utilizing this technology, cDNAs were amplified by PCR and then transferred, in duplicate, onto the array. Gene expression was assayed through hybridization of first strand cDNA probes to the DNA array. cDNA probes were generated from total RNA extracted from a variety of different tissues and cell lines. Probe synthesis was performed in the presence of ³³P dCTP, using oligo(dT) to prime reverse transcription. After hybridization, high stringency washing conditions were employed to remove non-specific hybrids from the array. The remaining signal, emanating from each gene target, was measured using a Phosphorimager. Gene expression was reported as Phosphor Stimulating Luminescence (PSL) which reflects the level of phosphor signal generated from the probe hybridized to each of the gene targets represented on the array. A local background signal subtraction was performed before the total signal generated from each array was used to normalize gene expression between the different hybridizations. The value presented after “[array code]:” represents the mean of the duplicate values, following background subtraction and probe normalization. One of skill in the art could routinely use this information to identify normal and/or diseased tissue(s) which show a predominant expression pattern of the corresponding polynucleotide of the invention or to identify polynucleotides which show predominant and/or specific tissue and/or cell expression. Column 9 provides the chromosomal location of polynucleotides corresponding to SEQ ID NO:X. Chromosomal location was determined by finding exact matches to EST and cDNA sequences contained in the NCBI (National Center for Biotechnology Information) UniGene database. Given a presumptive chromosomal location, disease locus association was determined by comparison with the Morbid Map, derived from Online Mendelian Inheritance in Man (Online Mendelian Inheritance in Man, OMIM™. McKusick-Nathans Institute for Genetic Medicine, Johns Hopkins University (Baltimore, Md.) and National Center for Biotechnology Information, National Library of Medicine (Bethesda, Md.) 2000. World Wide Web URL: http://www.ncbi.nlm.nih.gov/omim/). If the putative chromosomal location of the Query overlaps with the chromosomal location of a Morbid Map entry, an OMIM identification number is disclosed in column 10 labeled “OMIM Disease Reference(s)”. A key to the OMIM reference identification numbers is provided in Table 5.

[0016] Table 1B summarizes additional polynucleotides encompassed by the invention (including cDNA clones related to the sequences (Clone ID NO:Z), contig sequences (contig identifier (Contig ID:) contig nucleotide sequence identifiers (SEQ ID NO:X)), and genomic sequences (SEQ ID NO:B). The first column provides a unique clone identifier, “Clone ID NO:Z”, for a cDNA clone related to each contig sequence. The second column provides the sequence identifier, “SEQ ID NO:X”, for each contig sequence. The third column provides a unique contig identifier, “Contig ID:” for each contig sequence. The fourth column, provides a BAC identifier “BAC ID NO:A” for the BAC clone referenced in the corresponding row of the table. The fifth column provides the nucleotide sequence identifier, “SEQ ID NO:B” for a fragment of the BAC clone identified in column four of the corresponding row of the table. The sixth column, “Exon From-To”, provides the location (i.e., nucleotide position numbers) within the polynucleotide sequence of SEQ ID NO:B which delineate certain polynucleotides of the invention that are also-exemplary members of polynucleotide sequences that encode polypeptides of the invention (e.g., polypeptides containing amino acid sequences encoded by the polynucleotide sequences delineated in column six, and fragments and variants thereof).

[0017] Table 2 summarizes homology and features of some of the polypeptides of the invention. The first column provides a unique clone identifier, “Clone ID NO:Z”, corresponding to a cDNA clone disclosed in Table 1A. The second column provides the unique contig identifier, “Contig ID:” corresponding to contigs in Table 1A and allowing for correlation with the information in Table 1A. The third column provides the sequence identifier, “SEQ ID NO:X”, for the contig polynucleotide sequence. The fourth column provides the analysis method by which the homology/identity disclosed in the Table was determined. Comparisons were made between polypeptides encoded by the polynucleotides of the invention and either a non-redundant protein database (herein referred to as “NR”), or a database of protein families (herein referred to as “PFAM”) as further described below. The fifth column provides a description of the PFAMINR hit having a significant match to a polypeptide of the invention. Column six provides the accession number of the PFAM/NR hit disclosed in the fifth column. Column seven, “Score/Percent Identity”, provides a quality score or the percent identity, of the hit disclosed in columns five and six. Columns 8 and 9, “NT From” and “NT To” respectively, delineate the polynucleotides in “SEQ ID NO:X” that encode a polypeptide having a significant match to-the PFAM/NR database as disclosed in the fifth and sixth columns. In specific embodiments polypeptides of the invention comprise, or alternatively consist of, an amino acid sequence encoded by a polynucleotide in SEQ ID NO:X as delineated in columns 8 and 9, or fragments or variants thereof.

[0018] Table 3 provides polynucleotide sequences that may be disclaimed according to certain embodiments of the invention. The first column provides a unique clone identifier, “Clone ID”, for a cDNA clone related to contig sequences disclosed in Table 1A. The second column provides the sequence identifier, “SEQ ID NO:X”, for contig sequences disclosed in Table 1A. The third column provides the unique contig identifier, “Contig ID:”, for contigs disclosed in Table 1A. The fourth column provides a unique integer ‘a’ where ‘a’ is any integer between 1 and the final nucleotide minus 15 of SEQ ID NO:X, and the fifth column provides a unique integer ‘b’ where ‘b’ is any integer between 15 and the final nucleotide of SEQ ID NO:X, where both a and b correspond to the positions of nucleotide residues shown in SEQ ID NO:X, and where b is greater than or equal to a +14. For each of the polynucleotides shown as SEQ ID NO:X, the uniquely defined integers can be substituted into the general formula of a-b, and used to describe polynucleotides which may be preferably excluded from the invention. In certain embodiments, preferably excluded from the invention are at least one, two, three, four, five, ten, or more of the polynucleotide sequence(s) having the accession number(s) disclosed in the sixth column of this Table (including for example, published sequence in connection with a particular BAC clone). In further embodiments, preferably excluded from the invention are the specific polynucleotide sequence(s) contained in the clones corresponding to at least one, two, three, four, five, ten, or more of the available material having the accession numbers identified in the sixth column of this Table (including for example, the actual sequence contained in an identified BAC clone).

[0019] Table 4 provides a key to the tissue/cell source identifier code disclosed in Table 1A, column 8. Column 1 provides the tissue/cell source identifier code disclosed in Table 1A, Column 8. Columns 2-5 provide a description of the tissue or cell source. Codes corresp onding to diseased tissues are indicated in column 6 with the word “disease”. The use of the word “disease” in column 6 is non-limiting. The tissue or cell source may be specific (e.g. a neoplasm), or may be disease-associated (e.g., a tissue sample from a normal portion of a diseased organ). Furthermore, tissues and/or cells lacking the “disease” designation may still be derived from sources directly or indirectly involved in a disease state or disorder, and therefore may have a further utility in that disease state or disorder. In numerous cases where the tissue/cell source is a library, column 7 identifies the vector used to generate the library.

[0020] Table 5 provides a key to the OMIM reference identification numbers disclosed in Table 1A, column 10. OMIM reference identification numbers (Column 1) were derived from Online Mendelian Inheritance in Man (Online Mendelian Inheritance in Man, OMIM. McKusick-Nathans Institute for Genetic Medicine, Johns Hopkins University (Baltimore, Md.) and National Center for Biotechnology Information, National Library of Medicine, (Bethesda, Md.) 2000. World Wide Web URL: http://www.ncbi.nlm.nih.gov/omim/). Column 2 provides diseases associated with the cytologic band disclosed in Table 1A, column 9, as determined using the Morbid Map database. 1201 Table 6 summarizes ATCC Deposits, Deposit dates, and ATCC designation numbers of deposits made with the ATCC in connection with the present application.

[0021] Table 7 shows the cDNA libraries sequenced, and ATCC designation numbers and vector information relating to these cDNA libraries.

[0022] Table 8 provides a physical characterization of clones encompassed by the invention. The first column provides the unique clone identifier, “Clone ID NO:Z”, for certain cDNA clones of the invention, as described in Table 1A. The second column provides the size of the cDNA insert contained in the corresponding cDNA clone.

[0023] Definitions

[0024] The following definitions are provided to facilitate understanding of certain terms used throughout this specification.

[0025] In the present invention, “isolated” refers to material removed from its original environment (e.g., the natural environment if it is naturally occurring), and thus is altered “by the hand of man” from its natural state. For example, an isolated polynucleotide could be part of a vector or a composition of matter, or could be contained within a cell, and still be “isolated” because that vector, composition of matter, or particular cell is not the original environment of the polynucleotide. The term “isolated” does not refer to genomic or cDNA libraries, whole cell total or mRNA preparations, genomic DNA preparations (including those separated by electrophoresis and transferred onto blots), sheared whole cell genomic DNA preparations or other compositions where the art demonstrates no distinguishing features of the polynucleotide/sequences of the present invention.

[0026] As used herein, a “polynucleotide” refers to a molecule having a nucleic acid sequence encoding SEQ ID NO:Y or a fragment or variant thereof; a nucleic acid sequence contained in SEQ ID NO:X (as described in column 3 of Table 1A) or the complement thereof; a cDNA sequence contained in Clone ID NO:Z (as described in column 2 of Table 1A and contained within a library deposited, with the ATCC); a nucleotide sequence encoding the polypeptide encoded by a nucleotide sequence in SEQ ID NO:B as defined in column 6 of Table 1B or a fragment or variant thereof; or a nucleotide coding sequence in SEQ ID NO:B as defined in column 6 of Table 1B or the complement thereof. For example, the polynucleotide can contain the nucleotide sequence of the full length cDNA sequence, including the 5′ and 3′ untranslated sequences, the coding region, as well as fragments, epitopes, domains, and variants of the nucleic acid sequence. Moreover, as used herein, a “polypeptide” refers to a molecule having an amino acid sequence encoded by a polynucleotide of the invention as broadly defined (obviously excluding poly-Phenylalanine or poly-Lysine peptide sequences which result from translation of a polyA tail of a sequence corresponding to a cDNA).

[0027] In the present invention, “SEQ ID NO:X” was often generated by overlapping sequences contained in multiple clones (contig analysis). A representative clone containing all or most of the sequence for SEQ ID NO:X is deposited at Human Genome Sciences, Inc. (HGS) in a catalogued and archived library. As shown, for example, in column 2 of Table 1A, each clone is identified by a cDNA Clone ID (identifier generally referred to herein as Clone ID NO:Z). Each Clone ID is unique to an individual clone and the Clone ID is all the information needed to retrieve a given clone from the HGS library. Furthermore, certain clones disclosed in this application have been deposited with the ATCC on Oct. 5, 2000, having the ATCC designation numbers PTA 2574 and PTA 2575; and on Jan. 5, 2001, having the depositor reference numbers TS-1, TS-2, AC-1, and AC-2. In addition to the individual cDNA clone deposits, most of the cDNA libraries from which the clones were derived were deposited at the American Type Culture Collection (hereinafter “ATCC”). Table 7 provides a list of the deposited cDNA libraries. One can use the Clone ID NO:Z to determine the library source by reference to Tables 6 and 7. Table 7 lists the deposited cDNA libraries by name and links each library to an ATCC Deposit. Library names contain four characters, for example, “HTWE.” The name of a cDNA clone (Clone ID) isolated from that library begins with the same four characters, for example “HTWEP07”. As mentioned below, Table 1A correlates the Clone ID names with SEQ ID NO:X. Thus, starting with an SEQ ID NO:X, one can use Tables 1, 6 and 7 to determine the corresponding Clone ID, which library it came from and which ATCC deposit the library is contained in. Furthermore, it is possible to retrieve a given cDNA clone from the source library by techniques known in the art and described elsewhere herein. The ATCC is located at 10801 University Boulevard, Manassas, Va. 20110-2209, USA. The ATCC deposits were made pursuant to the terms of the Budapest Treaty on the international recognition of the deposit of microorganisms for the purposes of patent procedure.

[0028] In specific embodiments, the polynucleotides of the invention are at least 15, at least 30, at least 50, at least 100, at least 125, at least 500, or at least 1000 continuous nucleotides but are less than or equal to 300 kb, 200 kb, 100 kb, 50 kb, 15 kb, 10 kb, 7.5kb, 5 kb, 2.5 kb, 2.0 kb, or 1 kb, in length. In a further embodiment, polynucleotides of the invention comprise a portion of the coding sequences, as disclosed herein, but do not comprise all or a portion of any intron. In another embodiment, the polynucleotides comprising coding sequences do not contain coding sequences of a genomic flanking gene (i.e., 5′ or 3′ to the gene of interest in the genome). In other embodiments, the polynucleotides of the invention do not contain the coding sequence of more than 1000, 500, 250, 100, 50, 25, 20, 15, 10, 5, 4, 3, 2, or 1 genomic flanking gene(s).

[0029] A “polynucleotide” of the present invention also includes those polynucleotides capable of hybridizing, under stringent hybridization conditions, to sequences contained in SEQ ID NO:X, or the complement thereof (e.g., the complement of any one, two, three, -four, or more of the polynucleotide fragments described herein), the polynucleotide sequence delineated in columns 8 and 9 of Table 2 or the complement thereof, and/or cDNA sequences contained in Clone ID NO:Z (e.g., the complement of any one, two, three, four, or more of the polynucleotide fragments, or the cDNA clone within the pool of cDNA clones deposited with the ATCC, described herein), and/or the polynucleotide sequence delineated in column 6 of Table 1B or the complement thereof. “Stringent hybridization conditions” refers to an overnight incubation at 42 degree C in a solution comprising 50% formamide, 5× SSC (750 mM NaCl, 75 mM trisodium citrate), 50 mM sodium phosphate (pH 7.6), 5× Denhardt's solution, 10% dextran sulfate, and 20 μg/ml denatured, sheared salmon sperm DNA, followed by washing the filters in 0.1× SSC at about 65 degree C.

[0030] Also contemplated are nucleic acid molecules that hybridize to the polynucleotides of the present invention at lower stringency hybridization conditions. Changes in the stringency of hybridization and signal detection are primarily accomplished through the manipulation of formamide concentration (lower percentages of formamide result in lowered stringency); salt conditions, or temperature. For example, lower stringency conditions include an overnight incubation at 37 degree C in a solution comprising 6× SSPE (20× SSPE=3M NaCl; 0.2M NaH₂PO₄; 0.02M EDTA, pH 7.4), 0.5% SDS, 30% formamide, 100 ug/ml salmon sperm blocking DNA; followed by washes at 50 degree C with 1× SSPE, 0.1% SDS. In addition, to achieve even lower stringency, washes performed following stringent hybridization can be done at higher salt concentrations (e.g. 5× SSC).

[0031] Note that variations in the above conditions may be accomplished through the inclusion and/or substitution of alternate blocking reagents used to suppress background in hybridization experiments. Typical blocking reagents include Denhardt's reagent, BLOTTO, heparin, denatured salmon sperm DNA, and commercially available proprietary formulations. The inclusion of specific blocking reagents may require modification of the hybridization conditions described above, due to problems with compatibility.

[0032] Of course, a polynucleotide which hybridizes only to polyA+ sequences (such as any 3′ terminal polyA+ tract of a cDNA shown in the sequence listing), or to a complementary stretch of T (or U) residues, would not be included in the definition of “polynucleotide,” since such a polynucleotide would hybridize to any nucleic acid molecule containing a poly (A) stretch or the complement thereof (e.g., practically any double-stranded EDNA clone generated using oligo dT as a primer).

[0033] The polynucleotide of the present invention can be composed of any polyribonucleotide or polydeoxribonucleotide, which may be unmodified RNA or DNA or modified RNA or DNA. For example, polynucleotides can be composed of single- and double-stranded DNA, DNA that is a mixture of single- and double-stranded regions, single- and double-stranded RNA, and RNA that is mixture of single- and double-stranded regions, hybrid molecules comprising DNA and RNA that may be single-stranded or, more typically, double-stranded or a mixture of single- and double-stranded regions. In addition, the polynucleotide can be composed of triple-stranded regions comprising RNA or DNA or both RNA and DNA. A polynucleotide may also contain one or more modified bases or DNA or RNA backbones modified for stability or for other reasons. “Modified” bases include, for example, tritylated bases and unusual bases such as inosine. A variety of modifications can be made to DNA and RNA; thus, “polynucleotide” embraces chemically, enzymatically, or metabolically modified forms.

[0034] The polypeptide of the present invention can be composed of amino acids joined to each other by peptide bonds or modified peptide bonds, i.e., peptide isosteres, and may contain amino acids other than the 20 gene-encoded amino acids. The polypeptides may be modified by either natural processes, such as posttranslational processing, or by chemical modification techniques which are well known in the art. Such modifications are well described in basic texts and in more detailed monographs, as well as in a voluminous research literature. Modifications can occur anywhere in a polypeptide, including the peptide backbone, the amino acid side-chains and the amino or carboxyl termini. It will be appreciated that the same type of modification may be present in the same or varying degrees at several sites in a given polypeptide. Also, a given polypeptide may contain many types of modifications. Polypeptides may be branched, for example, as a result of ubiquitination, and they may be cyclic, with or without branching. Cyclic, branched, and branched cyclic polypeptides may result from posttranslation natural processes or may be made by synthetic methods. Modifications include acetylation, acylation, ADP-ribosylation, amidation, covalent attachment of flavin, covalent attachment of a heme moiety, covalent attachment of a nucleotide or nucteotide derivative, covalent attachment of a lipid or lipid derivative, covalent attachment of phosphotidylinositol, cross-linking, cyclization, disulfide bond formation, demethylation, formation of covalent cross-links, formation of cysteine, formation of pyroglutamate, formylation, gamma-carboxylation, glycosylation, GPI anchor formation, hydroxylation, iodination, methylation, myristoylation, oxidation, pegylation, proteolytic processing, phosphorylation, prenylation, racemization, selenoylation, sulfation, transfer-RNA mediated addition of amino acids to proteins such as arginylation, and ubiquitination. (See, for instance, PROTEINS—STRUCTURE AND MOLECULAR PROPERTIES, 2nd Ed., T. E. Creighton, W. H. Freeman and Company, New York (1993); POSTTRANSLATIONAL COVALENT MODIFICATION OF PROTEINS, B. C. Johnson, Ed., Academic Press, New York, pgs. 1-12 (1983); Seifter et al., Meth. Enzymol. 182:626-646 (1990); Rattan et al., Ann. N.Y. Acad. Sci. 663:48-62 (1992)).

[0035] “SEQ ID NO:X” refers to a polynucleotide sequence described, for example, in Tables 1A or 2, while “SEQ ID NO:Y” refers to a polypeptide sequence described in column -6 of Table 1A. SEQ ID NO:X is identified by an integer specified in column 4 of Table 1A. The polypeptide sequence SEQ ID NO:Y is a translated open reading frame (ORF) encoded by polynucleotide SEQ ID NO:X. “Clone ID NO:Z” refers to a cDNA clone described in column 2 of Table 1A.

[0036] “A polypeptide having functional activity” refers to a polypeptide capable of displaying one or more known functional activities associated with a full-length (complete) protein. Such functional activities include, but are not limited to, biological activity, antigenicity [ability to bind (or compete with a polypeptide for binding) to an anti-polypeptide antibody], immunogenicity (ability to generate antibody which binds to a specific polypeptide of the invention), ability to form multimers with polypeptides of the invention, and ability to bind to a receptor or ligand for a polypeptide.

[0037] The polypeptides of the invention can be assayed for functional activity (e.g. biological activity) using or routinely modifying assays known in the art, as well as assays described herein. Specifically, one of skill in the art may routinely assay immunoglobulin superfamily polypeptides (including fragments and variants) of the invention for activity using assays as described in Examples 41, 43, 48, 51 and 67.

[0038] “A polypeptide having biological activity” refers to a polypeptide exhibiting activity similar to, but not necessarily identical to, an activity of a polypeptide of the present invention, including mature forms, as measured in a particular biological assay, with or without dose dependency. In the case where dose dependency does exist, it need not be identical to that of the polypeptide, but rather substantially similar to the dose-dependence in a given activity as compared to the polypeptide of the present invention (i.e., the candidate polypeptide will exhibit greater activity or not more than about 25-fold less and, preferably, not more than about tenfold less activity, and most preferably, not more than about three-fold less activity relative to the polypeptide of the present invention).

[0039] Table 1A summarizes some of the polynucleotides encompassed by the invention (including contig sequences (SEQ ID NO:X) and clones (Clone ID NO:Z) and further summarizes certain characteristics of these polynucleotides and the polypeptides encoded thereby.

TABLE 1A

| | | | | | AA | | Tissue Distribution | | |
|---|---|---|---|---|---|---|---|---|---|
| | | | | | SEQ | | Library code: count | | OMIM |
| Gene | Clone ID | Contig | SEQ ID | ORF | ID | | (see Table IV for | Cytologic | Disease |
| No: | NO: Z | ID: | NO: X | (From-To) | NO: Y | Predicted Epitopes | Library Codes) | Band | Reference(s): |
| 1 | HAHDI40 | 710790 | 11 | 144-656 | 122 | Lys-1 to Thr-19, | AR089: 4, AR061: 2 | | |
| | | | | | | Lys-30 to Thr-42, | L0803: 4, L0794: 3, | | |
| | | | | | | Asp-55 to Tyr-64. | L0747: 3, H0599: 2, | | |
| | | | | | | | L0659: 2, L0789: 2, | | |
| | | | | | | | S0364: 1, L0804: 1, | | |
| | | | | | | | H0539: 1, L0720: 1 and | | |
| | | | | | | | S0031: 1. | | |
| 2 | HDPTW90 | 722699 | 12 | 1-282 | 123 | Gly-13 to Gly-18, | AR089: 0, AR061: 0 | | |
| | | | | | | Arg-26 to Gly-33, | H0521: 2 and H0641: 1. | | |
| | | | | | | Gly-40 to Gly-49. | | | |
| 3 | HDPXL24 | 1227222 | 13 | 150-1907 | 124 | Leu-1 to Cys-6, | AR050: 25, AR054: | | |
| | | | | | | Pro-54 to Gly-62, | 23, AR051: 18, AR089: | | |
| | | | | | | Pro-88 to Asp-97, | 2, AR061: 1 | | |
| | | | | | | Pro-99 to Arg-105, | H0521: 12, L0751: 6, | | |
| | | | | | | Asp-115 to Ala-120, | H0445: 4, L0770: 3, | | |
| | | | | | | Leu-147 to Phe-157, | L0775: 3, L0769: 2, | | |
| | | | | | | His-215 to Leu-220, | L0764: 2, L0806: 2, | | |
| | | | | | | Gln-246 to Arg-255, | L0744: 2, L0748: 2, | | |
| | | | | | | Phe-273 to Arg-279, | L0747: 2, L0599: 2, | | |
| | | | | | | Ser-495 to Ala-500, | H0638: 1, S0376: 1, | | |
| | | | | | | Arg-523 to Gly-528, | S0360: 1, H0619: 1, | | |
| | | | | | | Ser-560 to Asp-566. | H0351: 1, H0427: 1, | | |
| | | | | | | | H0575: 1, H0309: 1, | | |
| | | | | | | | T0023: 1, H0181: 1, | | |
| | | | | | | | H0617: 1, S0366: 1, | | |
| | | | | | | | S0142: 1, L0768: 1, | | |
| | | | | | | | S0374: 1, H0690: 1, | | |
| | | | | | | | H0672: 1, H0522: 1, | | |
| | | | | | | | H0555: 1, L0743: 1, | | |
| | | | | | | | L0749: 1, L0777: 1 and | | |
| | | | | | | | L0731: 1. | | |
| | | 846775 | 80 | 3-434 | 191 | | | | |
| 4 | HDTBW62 | 681324 | 14 | 6-221 | 125 | | AR061: 2, AR089: 2 | | |
| | | | | | | | S0358: 3, H0591: 3, | | |
| | | | | | | | L0439: 3, H0486: 2, | | |
| | | | | | | | L0659: 2, H0542: 2, | | |
| | | | | | | | H0171: 1, H0583: 1, | | |
| | | | | | | | H0663: 1, S0356: 1, | | |
| | | | | | | | S0360: 1, S0045: 1, | | |
| | | | | | | | S6026: 1, H0431: 1, | | |
| | | | | | | | H0331: 1, H0036: 1, | | |
| | | | | | | | S0346: 1, S0474: 1, | | |
| | | | | | | | H0581: 1, H0046: 1, | | |
| | | | | | | | H0572: 1, H0024: 1, | | |
| | | | | | | | H0014: 1, H0266: 1, | | |
| | | | | | | | H0615: 1, H0616: 1, | | |
| | | | | | | | H0100: 1, H0641: 1, | | |
| | | | | | | | L0763: 1, L0638: 1, | | |
| | | | | | | | L0771: 1, L0662: 1, | | |
| | | | | | | | L0803: 1, L0775: 1, | | |
| | | | | | | | L0653: 1, L0661: 1, | | |
| | | | | | | | L0657: 1, L0809: 1, | | |
| | | | | | | | L0519: 1, L0666: 1, | | |
| | | | | | | | L0665: 1, L0438: 1, | | |
| | | | | | | | H0520: 1, H0519: 1, | | |
| | | | | | | | H0658: 1, H0648: 1, | | |
| | | | | | | | L0744: 1, L0748: 1, | | |
| | | | | | | | L0777: 1, L0758: 1, | | |
| | | | | | | | L0595: 1, H0136: 1 and | | |
| | | | | | | | H0423: 1. | | |
| 5 | HE2KL28 | 1124892 | 15 | 1054-290 | 126 | Pro-8 to Leu-20, | AR089: 1, AR061: 0 | | |
| | | | | | | Ile-42 to Asp-47. | H0624: 2, H0171: 2, | | |
| | | | | | | | L0002: 1, H0599: 1, | | |
| | | | | | | | L0163: 1, S0388: 1, | | |
| | | | | | | | S0366: 1, L0520: 1, | | |
| | | | | | | | L0777: 1 and L0758: 1. | | |
| | | 872201 | 81 | 1-372 | 192 | Pro-8 to Leu-20, | | | |
| | | | | | | Ile-42 to Asp-47. | | | |
| 6 | HE8BQ58 | 1127528 | 16 | 76-309 | 127 | Gln-1 to Gly-8, | AR089: 32, AR061: 17 | | |
| | | | | | | Ser-28 to Asp-37, | L0747: 9, S0114: 3, | | |
| | | | | | | Gln-39 to Cys-47. | L0659: 3, L0749: 3, | | |
| | | | | | | | L0755: 3, H0595: 3, | | |
| | | | | | | | L0662: 2, L0776: 2, | | |
| | | | | | | | L0665: 2, H0659: 2, | | |
| | | | | | | | L0748: 2, L0740: 2, | | |
| | | | | | | | L0752: 2, H0556: 1, | | |
| | | | | | | | L0005: 1, S0358: 1, | | |
| | | | | | | | S0360: 1, L0717: 1, | | |
| | | | | | | | H0369: 1, H0013: 1, | | |
| | | | | | | | H0427: 1, H0318: 1, | | |
| | | | | | | | H0375: 1, H0266: 1, | | |
| | | | | | | | H0687: 1, H0252: 1, | | |
| | | | | | | | H0615: 1, H0622: 1, | | |
| | | | | | | | T0006: 1, H0644: 1, | | |
| | | | | | | | H0628: 1, T0067: 1, | | |
| | | | | | | | H0413; 1, S0142: 1, | | |
| | | | | | | | H0529: 1, L0763: 1, | | |
| | | | | | | | L0630: 1, L0764: 1, | | |
| | | | | | | | L0774: 1, L0653: 1, | | |
| | | | | | | | L0635: 1, L0809: 1, | | |
| | | | | | | | L0663: 1, S0378: 1, | | |
| | | | | | | | L0742: 1, L0779: 1, | | |
| | | | | | | | L0780: 1, L0757: 1, | | |
| | | | | | | | L0758: 1, L0759: 1, | | |
| | | | | | | | L0592: 1, S0026: 1 and | | |
| | | | | | | | S0276: 1. | | |
| | | 954449 | 82 | 78-311 | 193 | Gln-1 to Gly-8, | | | |
| | | | | | | Ser-28 to Pro-34. | | | |
| 7 | HHATR09 | 1129468 | 17 | 138-1082 | 128 | Asn-27 to Ser-36, | AR050: 98, AR054: | | |
| | | | | | | Arg-52 to Asn-60, | 70, AR051: 62, AR089: | | |
| | | | | | | Met-68 to Gln-73, | 18, AR061: 8 | | |
| | | | | | | Pro-163 to Asp-168, | S0418: 1 | | |
| | | | | | | Ile-181 to Glu-189, | | | |
| | | | | | | Ala-205 to Gln-212, | | | |
| | | | | | | Arg-257 to Asn-266, | | | |
| | | | | | | Pro-272 to Gly-299. | | | |
| | | 971330 | 83 | 138-1082 | 194 | Asn-27 to Ser-36, | | | |
| | | | | | | Arg-52 to Asn-60, | | | |
| | | | | | | Met-68 to Gln-73. | | | |
| 8 | HYABP53 | 1027455 | 18 | 843-1103 | 129 | Pro-18 to Pro-23, | AR054: 47, AR051: | | |
| | | | | | | Pro-42 to Ser-48, | 42, AR050: 39, AR089: | | |
| | | | | | | Pro-80 to Gly-85. | 1, AR061: 1 | | |
| | | | | | | | H0583: 1 and H0656: 1. | | |
| | | 971448 | 84 | 26-637 | 195 | His-1 to Gly-12, | | | |
| | | | | | | His-33 to Gly-44, | | | |
| | | | | | | Thr-124 to Gly-137, | | | |
| | | | | | | Thr-153 to Thr-158, | | | |
| | | | | | | Arg-188 to Gly-193. | | | |
| 9 | HHFML49 | 963278 | 19 | 3-1385 | 130 | Thr-33 to Arg-38, | AR050: 84, AR054: | | |
| | | | | | | Leu-41 to Ser-46, | 76, AR051: 67, AR089: | | |
| | | | | | | Thr-52 to Gly-58, | 4, AR061: 3 | | |
| | | | | | | Gly-68 to Ser-74, | H0619: 1 | | |
| | | | | | | Lys-107 to Asn-112, | | | |
| | | | | | | Ser-123 to Pro-128, | | | |
| | | | | | | Gln-168 to Arg-175, | | | |
| | | | | | | Glu-180 to Pro-187, | | | |
| | | | | | | Pro-206 to Gly-214, | | | |
| | | | | | | Glu-326 to Glu-332, | | | |
| | | | | | | Pro-370 to Thr-377, | | | |
| | | | | | | Thr-383 to Pro-391, | | | |
| | | | | | | Ala-400 to Gly-411, | | | |
| | | | | | | Arg-455 to Gln-461. | | | |
| | | 961194 | 85 | 602-1762 | 196 | Pro-6 to Gly-14, | | | |
| | | | | | | Glu-126 to Glu-132, | | | |
| | | | | | | Pro-170 to Thr-177, | | | |
| | | | | | | Thr-183 to Pro-191, | | | |
| | | | | | | Ala-200 to Gly-211, | | | |
| | | | | | | Gln-273 to Gly-280, | | | |
| | | | | | | Glu-291 to Arg-298, | | | |
| | | | | | | Pro-351 to Gln-367. | | | |
| 10 | HNTAR65 | 971373 | 20 | 34-1683 | 131 | His-1 to Gly-12. | AR061: 757, AR050: | | |
| | | | | | | | 347, AR051: 304, | | |
| | | | | | | | AR054: 265, AR089: 248 | | |
| | | | | | | | L0744: 8, L0777: 8, | | |
| | | | | | | | L0749: 6, S0126: 4, | | |
| | | | | | | | S0358: 3, H0622: 3, | | |
| | | | | | | | L0805: 3, H0519: 3, | | |
| | | | | | | | H0624: 2, L0717: 2, | | |
| | | | | | | | H0486: 2, H0012: 2, | | |
| | | | | | | | S0250: 2, L0662: 2, | | |
| | | | | | | | L0659: 2, L0519: 2, | | |
| | | | | | | | L0663: 2, L0438: 2, | | |
| | | | | | | | H0520: 2, H0435: 2, | | |
| | | | | | | | L0751: 2, L0747: 2, | | |
| | | | | | | | L0759: 2, H0685: 1, | | |
| | | | | | | | S0212: 1, H0550: 1, | | |
| | | | | | | | H0013: 1, S0280: 1, | | |
| | | | | | | | H0599: 1, H0575: 1, | | |
| | | | | | | | H0123: 1, L0471: 1, | | |
| | | | | | | | H0057: 1, H0266: 1, | | |
| | | | | | | | H0687: 1, H0292: 1, | | |
| | | | | | | | H0688: 1, H0030: 1, | | |
| | | | | | | | H0644: 1, T0041: 1, | | |
| | | | | | | | L0770: 1, L0771: 1, | | |
| | | | | | | | L0768: 1, L0803: 1, | | |
| | | | | | | | L0774: 1, L0655: 1, | | |
| | | | | | | | L0665: 1, H0547: 1, | | |
| | | | | | | | S0330: 1, H0539: 1, | | |
| | | | | | | | H0518: 1, S0152: 1, | | |
| | | | | | | | H0555: 1, S0390: 1, | | |
| | | | | | | | L0748: 1, L0439: 1, | | |
| | | | | | | | L0740: 1, L0779: 1, | | |
| | | | | | | | L0755: 1, L0731: 1, | | |
| | | | | | | | H0595: 1, L0591: 1, | | |
| | | | | | | | L0593: 1, S0192: 1 and | | |
| | | | | | | | S0196: 1. | | |
| 11 | HAGAS06 | 1048042 | 21 | 348-1178 | 132 | Thr-26 to Pro-31, | AR050: 18, AR054: | | |
| | | | | | | Asp-269 to Glu-277. | 15, AR051: 13 | | |
| 12 | HS2SH04 | 1129140 | 22 | 2-493 | 133 | Asn-1 to Gly-17, | AR050: 18, AR089: 2, | | |
| | | | | | | Gln-42 to Asp-51, | AR051: 2, AR061: 2, | | |
| | | | | | | Gly-100 to Asp-112. | AR054: 1 | | |
| | | | | | | | H0631: 1 | | |
| | | 947971 | 86 | 2-493 | 197 | Asn-1 to Gly-17, | | | |
| | | | | | | Gln-42 to Asp-51, | | | |
| | | | | | | Gly-100 to Asp-112. | | | |
| 13 | HAHFI44 | 1135445 | 23 | 3-785 | 134 | Glu-1 to Gln-8, | AR061: 6, AR089: 2 | | |
| | | | | | | Leu-77 to Thr-84, | L0757: 3, L0591: 3, | | |
| | | | | | | Asn-91 to Asn-96, | L0622: 1, H0599: 1, | | |
| | | | | | | Lys-147 to Thr-152, | H0144: 1, H0682: 1, | | |
| | | | | | | Pro-154 to Ser-161, | H0539: 1, S0192: 1 and | | |
| | | | | | | His-163 to Gly-168. | S0276: 1. | | |
| | | 910942 | 87 | 226-702 | 198 | Pro-1 to Thr-9, | | | |
| | | | | | | Asn-16 to Asn-21, | | | |
| | | | | | | Lys-72 to Thr-77, | | | |
| | | | | | | Pro-79 to Ser-86, | | | |
| | | | | | | His-88 to Gly-93, | | | |
| | | | | | | Ala-102 to Gly-108. | | | |
| 14 | HAPPY24 | 1136291 | 24 | 501-1283 | 135 | Gln-1 to Thr-7. | AR061: 5, AR089: 3 | | |
| | | | | | | | L0655: 2, L0603: 2, | | |
| | | | | | | | L0785: 1, H0663: 1, | | |
| | | | | | | | H0586: 1, H0575: 1, | | |
| | | | | | | | H0581: 1, H0457: 1, | | |
| | | | | | | | H0014: 1, H0606: 1, | | |
| | | | | | | | S0144: 1, L0790: 1, | | |
| | | | | | | | H0521: 1, L0749: 1 and | | |
| | | | | | | | H0445: 1 | | |
| | | 844293 | 88 | 2-454 | 199 | Gln-23 to Asp-28, | | | |
| | | | | | | Arg-59 to Asn-64, | | | |
| | | | | | | Ala-82 to His-88, | | | |
| | | | | | | Arg-97 to Thr-106. | | | |
| 15 | HBCBF11 | 1204344 | 25 | 2-964 | 136 | Thr-1 to Arg-11, | AR051: 14, AR054: | | |
| | | | | | | Arg-25 to Gln-30, | 10, AR050: 2, AR089: | | |
| | | | | | | Ser-83 to Gly-98, | 2, AR061: 2 | | |
| | | | | | | Thr-117 to Gly-122, | H0592: 2, L0754: 2, | | |
| | | | | | | Asn-130 to Gln-138, | S0132: 1, H0370: 1, | | |
| | | | | | | Asp-145 to Lys-152, | H0587: 1, S0344: 1, | | |
| | | | | | | Arg-184 to Glu-200, | L0665: 1, H0682: 1 and | | |
| | | | | | | Thr-204 to Ile-209, | H0555: 1. | | |
| | | | | | | His-215 to Glu-225, | | | |
| | | | | | | Glu-232 to Ser-243, | | | |
| | | | | | | Ser-248 to Ser-257, | | | |
| | | | | | | Arg-263 to Gln-268, | | | |
| | | | | | | Gly-275 to Gly-288, | | | |
| | | | | | | Leu-303 to Gly-309. | | | |
| | | 947959 | 89 | 2-733 | 200 | Thr-1 to Arg-11, | | | |
| | | | | | | Arg-25 to Gln-30, | | | |
| | | | | | | Ser-83 to Gly-98, | | | |
| | | | | | | Thr-117 to Gly-122, | | | |
| | | | | | | Asn-130 to Gln-138, | | | |
| | | | | | | Asp-145 to Lys-152, | | | |
| | | | | | | Arg-184 to Glu-200, | | | |
| | | | | | | Thr-204 to Ile-209, | | | |
| | | | | | | His-215 to Glu-225. | | | |
| 16 | HBJHS02 | 948293 | 26 | 1-543 | 137 | Ala-39 to Gly-44, | AR061: 6, AR089: 2 | | |
| | | | | | | Ala-89 to Tyr-97, | L0740: 25, L0766: 5, | | |
| | | | | | | Thr-103 to Gln-114, | L0655: 4, H0650: 2, | | |
| | | | | | | Pro-133 to Ser-138, | H0657: 2, H0656: 2, | | |
| | | | | | | Thr-143 to Pro-149, | H0402: 2, H0581: 2, | | |
| | | | | | | Pro-157 to Phe-164. | H0306: 1, H0575: 1, | | |
| | | | | | | | H0318: 1, H0046: 1, | | |
| | | | | | | | S0038: 1, H0429: 1, | | |
| | | | | | | | H0560: 1, S0344: 1, | | |
| | | | | | | | L0761: 1, L0794: 1, | | |
| | | | | | | | L0789: 1, S0053: 1, | | |
| | | | | | | | H0689: 1, H0134: 1, | | |
| | | | | | | | L0779: 1, L0777: 1 and | | |
| | | | | | | | H0445: 1. | | |
| | | 957030 | 90 | 785-390 | 201 | | | | |
| 17 | HRDFA94 | 577352 | 27 | 735-307 | 138 | Pro-5 to Leu-11. | AR050: 376, AR051: | | |
| | | | | | | | 307, AR054: 293, | | |
| | | | | | | | AR089: 105, AR061: 33 | | |
| | | | | | | | H0124: 1 and H0521: 1. | | |
| | | 937804 | 91 | 1-1572 | 202 | Gly-1 to Asn-10, | | | |
| | | | | | | Val-18 to Lys-25, | | | |
| | | | | | | Leu-69 to Arg-78, | | | |
| | | | | | | Asn-83 to Pro-89. | | | |
| 18 | HNTCU89 | 975097 | 28 | 1731-1183 | 139 | Ile-26 to Gly-31, | AR089: 3, AR061: 1 | | |
| | | | | | | Arg-161 to Thr-168. | L0754: 10, L0766: 9, | | |
| | | | | | | | L0591: 7, L0748: 6, | | |
| | | | | | | | H0170: 4, S0360: 4, | | |
| | | | | | | | L0752: 4, H0556: 3, | | |
| | | | | | | | H0031: 3, L0646: 3, | | |
| | | | | | | | L0527: 3, L0596: 3, | | |
| | | | | | | | H0423: 3, H0265: 2, | | |
| | | | | | | | S0114: 2, S0410: 2, | | |
| | | | | | | | H0013: 2, H0266: 2, | | |
| | | | | | | | H0615: 2, H0056: 2, | | |
| | | | | | | | L0803: 2, L0776: 2, | | |
| | | | | | | | L0782: 2, H0134: 2, | | |
| | | | | | | | H0436: 2, L0756: 2, | | |
| | | | | | | | L0362: 2, H0543: 2, | | |
| | | | | | | | H0624: 1, L0002: 1, | | |
| | | | | | | | H0650: 1, S0418: 1, | | |
| | | | | | | | H0208: 1, S0045: 1, | | |
| | | | | | | | S0046: 1, H0619: 1, | | |
| | | | | | | | T0048: 1, H0318: 1, | | |
| | | | | | | | L0109: 1, H0046: 1, | | |
| | | | | | | | H0050: 1, L0471: 1, | | |
| | | | | | | | S0051: 1, H0083: 1, | | |
| | | | | | | | H0328: 1, H0604: 1, | | |
| | | | | | | | H0068: 1, H0038: 1, | | |
| | | | | | | | H0551: 1, H0560: 1, | | |
| | | | | | | | H0561: 1, H0132: 1, | | |
| | | | | | | | L0763: 1, L0667: 1, | | |
| | | | | | | | L0662: 1, L0388: 1, | | |
| | | | | | | | L0804: 1, L0805: 1, | | |
| | | | | | | | L0606: 1, L0657: 1, | | |
| | | | | | | | L0659: 1, L0542: 1, | | |
| | | | | | | | L0518: 1, L0809: 1, | | |
| | | | | | | | L0791: 1, L0792: 1, | | |
| | | | | | | | H0547: 1, H0519: 1, | | |
| | | | | | | | H0682: 1, H0648: 1, | | |
| | | | | | | | S0330: 1, H0696: 1, | | |
| | | | | | | | L0750: 1, L0779: 1, | | |
| | | | | | | | L0731: 1, L0757: 1, | | |
| | | | | | | | L0759: 1, H0445: 1, | | |
| | | | | | | | L0480: 1, H0542: 1 and | | |
| | | | | | | | H0506: 1. | | |
| 19 | HAPNO50 | 941934 | 29 | 163-921 | 140 | Thr-2 to Asn-17, | AR054: 17, AR051: 4, | | |
| | | | | | | Pro-28 to Lys-37, | AR050: 2 | | |
| | | | | | | Glu-70 to Ser-92, | | | |
| | | | | | | Ile-98 to Ile-107, | | | |
| | | | | | | Leu-123 to Asp-128, | | | |
| | | | | | | Glu-153 to Arg-160, | | | |
| | | | | | | Thr-196 to Lys-203, | | | |
| | | | | | | Lys-217 to Thr-222, | | | |
| | | | | | | Lys-240 to Val-247. | | | |
| | | 834384 | 92 | 941-831 | 203 | | | | |
| 20 | HKACI15 | 892363 | 30 | 2-904 | 141 | Phe-66 to Thr-71, | AR089: 5, AR051: 3, | | |
| | | | | | | Ser-100 to Thr-108, | AR061: 2, AR054: 1 | | |
| | | | | | | Glu-116 to Gly-122, | L0748: 9, L0754: 6, | | |
| | | | | | | Ser-156 to Phe-169, | L0595: 6, L0659: 5, | | |
| | | | | | | Thr-177 to Ser-188, | H0046: 4, H0644: 4, | | |
| | | | | | | Ala-216 to Gly-221, | H0623: 4, H0521: 4, | | |
| | | | | | | Ser-264 to Ser-277, | H0556: 3, S0046: 3, | | |
| | | | | | | Pro-285 to Thr-296. | H0494: 3, L0764: 3, | | |
| | | | | | | | L0750: 3, L0759: 3, | | |
| | | | | | | | L0603: 3, H0295: 2, | | |
| | | | | | | | H0254: 2, S0045: 2, | | |
| | | | | | | | H0393: 2, H0370: 2, | | |
| | | | | | | | H0590: 2, H0622: 2, | | |
| | | | | | | | H0553: 2, H0264: 2, | | |
| | | | | | | | S0144: 2, S0142: 2, | | |
| | | | | | | | S0344: 2, S0002: 2, | | |
| | | | | | | | L0768: 2, L0783: 2, | | |
| | | | | | | | L0664: 2, S0374: 2, | | |
| | | | | | | | H0520: 2, H0547: 2, | | |
| | | | | | | | S0152: 2, L0740: 2, | | |
| | | | | | | | L0596: 2, H0294: 1, | | |
| | | | | | | | T0049: 1, H0255: 1, | | |
| | | | | | | | H0662: 1, H0638: 1, | | |
| | | | | | | | S0420: 1, S0356: 1, | | |
| | | | | | | | S0442: 1, S0354: 1, | | |
| | | | | | | | S0358: 1, H0580: 1, | | |
| | | | | | | | S0132: 1, H0619: 1, | | |
| | | | | | | | S0278: 1, S6022: 1, | | |
| | | | | | | | H0587: 1, H0331: 1, | | |
| | | | | | | | H0013: 1, H0575: 1, | | |
| | | | | | | | S0474: 1, H0581: 1, | | |
| | | | | | | | H0123: 1, H0050: 1, | | |
| | | | | | | | H0024: 1, S0051: 1, | | |
| | | | | | | | S0368: 1, H0031: 1, | | |
| | | | | | | | L0142: 1, H0617: 1, | | |
| | | | | | | | H0598: 1, H0634: 1, | | |
| | | | | | | | H0063: 1, H0268: 1, | | |
| | | | | | | | H0059: 1, H0100: 1, | | |
| | | | | | | | H0625: 1, H0396: 1, | | |
| | | | | | | | H0509: 1, H0641: 1, | | |
| | | | | | | | H0647: 1, H0646: 1, | | |
| | | | | | | | H0649: 1, H0652: 1, | | |
| | | | | | | | H0538: 1, L0763: 1, | | |
| | | | | | | | L0646: 1, L0662: 1, | | |
| | | | | | | | L0363: 1, L0766: 1, | | |
| | | | | | | | L0649: 1, L0389: 1, | | |
| | | | | | | | L0774: 1, L0653: 1, | | |
| | | | | | | | L0655: 1, L0658: 1, | | |
| | | | | | | | L0636: 1, L0517: 1, | | |
| | | | | | | | L0790: 1, L0666: 1, | | |
| | | | | | | | S0310: 1, H0519: 1, | | |
| | | | | | | | H0593: 1, S0328: 1, | | |
| | | | | | | | H0518: 1, S0013: 1, | | |
| | | | | | | | S0044: 1, H0436: 1, | | |
| | | | | | | | L0743: 1, L0747: 1, | | |
| | | | | | | | L0749: 1, L0752: 1, | | |
| | | | | | | | L0581: 1, L0593: 1 and | | |
| | | | | | | | S0456: 1. | | |
| 21 | HMSNC17 | 1207838 | 31 | 84-707 | 142 | His-8 to Gly-18, | AR089: 44, AR061: | | |
| | | | | | | Arg-44 to Ser-49, | 32, AR054: 12, AR050: | | |
| | | | | | | Pro-91 to Thr-98. | 1, AR051: 0 | | |
| | | | | | | | L0596: 4, L0779: 3, | | |
| | | | | | | | H0486: 2, L0766: 2, | | |
| | | | | | | | L0748: 2, L0752: 2, | | |
| | | | | | | | H0459: 1, L0717: 1, | | |
| | | | | | | | S0280: 1, H0014: 1, | | |
| | | | | | | | H0615: 1, H0591: 1, | | |
| | | | | | | | S0426: 1, L0649: 1, | | |
| | | | | | | | L0776: 1, H0658: 1, | | |
| | | | | | | | H0518: 1, H0576: 1, | | |
| | | | | | | | L0747: 1, L0777: 1, | | |
| | | | | | | | H0423: 1 and H0422: 1. | | |
| | | 903712 | 93 | 136-654 | 204 | Pro-10 to His-16, | | | |
| | | | | | | Pro-28 to Asp-38. | | | |
| 22 | HOFMP09 | 943358 | 32 | 1-372 | 143 | Ala-74 to Gly-84, | AR089: 20, AR061: 9 | | |
| | | | | | | Arg-98 to Lys-104. | H0415: 1 | | |
| 23 | HSXBF22 | 952744 | 33 | 252-1034 | 144 | Ala-27 to Ala-32, | AR089: 1, AR061: 0 | | |
| | | | | | | Lys-75 to Arg-82, | H0265: 6, H0556: 3, | | |
| | | | | | | Glu-124 to Arg-130, | H0250: 2, L0770: 2, | | |
| | | | | | | Gln-156 to Gln-163, | H0543: 2, S0001: 1, | | |
| | | | | | | Glu-174 to Arg-179, | H0455: 1, H0051: 1, | | |
| | | | | | | Pro-217 to Gly-222, | S6028: 1, H0111: 1, | | |
| | | | | | | Pro-224 to Asp-240. | S0036: 1, H0040: 1, | | |
| | | | | | | | T0041: 1, H0561: 1, | | |
| | | | | | | | S0150: 1, L0769: 1, | | |
| | | | | | | | L0809: 1, L0788: 1, | | |
| | | | | | | | H0521: 1, H0696: 1, | | |
| | | | | | | | L0741: 1, L0756: 1 and | | |
| | | | | | | | S0260: 1. | | |
| | | 952874 | 94 | 252-1025 | 205 | Ala-27 to Ala-32, | | | |
| | | | | | | Lys-75 to Arg-82, | | | |
| | | | | | | Glu-124 to Arg-130, | | | |
| | | | | | | Gln-156 to Gln-163, | | | |
| | | | | | | Glu-174 to Arg-179, | | | |
| | | | | | | Pro-217 to Gly-222, | | | |
| | | | | | | Pro-224 to Asp-240. | | | |
| 24 | HWLHY05 | 901894 | 34 | 585-388 | 145 | Ile-19 to Glu-24, | AR054: 3, AR050: 1 | | |
| | | | | | | Lys-32 to Thr-40. | | | |
| 25 | HHFME38 | 947970 | 35 | 2-643 | 146 | Pro-1 to Gln-6, | AR054: 42, AR050: 9, | | |
| | | | | | | Pro-90 to Trp-95, | AR089: 2, AR061: 2 | | |
| | | | | | | Ser-152 to Gly-165. | L0659: 7, L0777: 7, | | |
| | | | | | | | S0358: 6, H0622: 6, | | |
| | | | | | | | H0486: 5, S0360: 4, | | |
| | | | | | | | L0662: 4, H0013: 3, | | |
| | | | | | | | H0144: 3, S0328: 3, | | |
| | | | | | | | L0751: 3, L0731: 3, | | |
| | | | | | | | H0624: 2, H0619: 2, | | |
| | | | | | | | H0620: 2, H0328: 2, | | |
| | | | | | | | L0520: 2, L0764: 2, | | |
| | | | | | | | L0666: 2, H0539: 2, | | |
| | | | | | | | L0747: 2, S0116: 1, | | |
| | | | | | | | S0356: 1, S0376: 1, | | |
| | | | | | | | H0431: 1, H0600: 1, | | |
| | | | | | | | H0632: 1, H0244: 1, | | |
| | | | | | | | H0599: 1, H0123: 1, | | |
| | | | | | | | H0050: 1, H0051: 1, | | |
| | | | | | | | S0250: 1, H0688: 1, | | |
| | | | | | | | H0039: 1, H0163: 1, | | |
| | | | | | | | H0090: 1, H0591: 1, | | |
| | | | | | | | H0040: 1, H0102: 1, | | |
| | | | | | | | S0150: 1, H0647: 1, | | |
| | | | | | | | H0646: 1, L0640: 1, | | |
| | | | | | | | L0763: 1, L0768: 1, | | |
| | | | | | | | L0649: 1, L0806: 1, | | |
| | | | | | | | L0793: 1, H0690: 1, | | |
| | | | | | | | H0684: 1, H0658: 1, | | |
| | | | | | | | H0648: 1, L0779: 1, | | |
| | | | | | | | L0780: 1, L0759: 1 and | | |
| | | | | | | | S0011: 1. | | |
| 26 | HHSGV13 | 943090 | 36 | 1-789 | 147 | Thr-9 to Ser-16, | AR089: 8, AR061: 4 | | |
| | | | | | | Pro-30 to Ser-35, | L0742: 6, L0438: 5, | | |
| | | | | | | Phe-58 to Met-64, | L0005: 4, H0052: 4, | | |
| | | | | | | Glu-97 to Asp-104, | S6024: 3, L0776: 3, | | |
| | | | | | | Ser-119 to Tyr-124, | L0439: 3, S0049: 2, | | |
| | | | | | | Pro-191 to Ile-196, | T0006: 2, H0144: 2, | | |
| | | | | | | Tyr-216 to Gly-228. | S0001: 1, S0222: 1, | | |
| | | | | | | | H0194: 1, H0009: 1, | | |
| | | | | | | | S0388: 1, T0010: 1, | | |
| | | | | | | | S6028: 1, L0351: 1, | | |
| | | | | | | | L0638: 1, L0768: 1, | | |
| | | | | | | | L0659: 1 and L0783: 1. | | |
| 27 | HLQBY46 | 1124369 | 37 | 293-724 | 148 | Ala-41 to Gln-48, | H0521: 39, H0581: 25, | | |
| | | | | | | Thr-75 to Thr-81, | H0580: 21, H0561: 21, | | |
| | | | | | | Ser-121 to Phe-132, | H0271: 18, H0179: 17, | | |
| | | | | | | Pro-134 to Gly-141. | S0116: 12, H0090: 11, | | |
| | | | | | | | H0522: 11, S0212: 10, | | |
| | | | | | | | H0518: 10, H0413: 9, | | |
| | | | | | | | H0486: 8, H0457: 8, | | |
| | | | | | | | L0757: 8, H0421: 7, | | |
| | | | | | | | H0543: 7, H0069: 6, | | |
| | | | | | | | S0126: 6, H0436: 6, | | |
| | | | | | | | S0027: 6, L0749: 6, | | |
| | | | | | | | H0423: 6, H0583: 5, | | |
| | | | | | | | L0766: 5, L0731: 5, | | |
| | | | | | | | H0445: 5, H0458: 4, | | |
| | | | | | | | S0360: 4, S0046: 4, | | |
| | | | | | | | S0278: 4, S0414: 4, | | |
| | | | | | | | H0250: 4, T0071: 4, | | |
| | | | | | | | H0412: 4, L0770: 4, | | |
| | | | | | | | L0776: 4, L0752: 4, | | |
| | | | | | | | H0542: 4, T0049: 3, | | |
| | | | | | | | H0341: 3, H0638: 3, | | |
| | | | | | | | H0575: 3, H0266: 3, | | |
| | | | | | | | H0416: 3, S0003: 3, | | |
| | | | | | | | H0529: 3, L0777: 3, | | |
| | | | | | | | L0362: 3, H0506: 3, | | |
| | | | | | | | S0134: 2, H0402: 2, | | |
| | | | | | | | H0450: 2, S0418: 2, | | |
| | | | | | | | S0358: 2, H0492: 2, | | |
| | | | | | | | H0427: 2, H0251: 2, | | |
| | | | | | | | H0375: 2, H0031: 2, | | |
| | | | | | | | H0553: 2, H0634: 2, | | |
| | | | | | | | S0002: 2, L0775: 2, | | |
| | | | | | | | L0655: 2, L0607: 2, | | |
| | | | | | | | S0052: 2, H0187: 2, | | |
| | | | | | | | H0576: 2, S0028: 2, | | |
| | | | | | | | L0740: 2, L0750: 2, | | |
| | | | | | | | S0242: 2, S0196: 2, | | |
| | | | | | | | H0422: 2, S0424: 2, | | |
| | | | | | | | L0600: 2, H0265: 1, | | |
| | | | | | | | H0556: 1, T0002: 1, | | |
| | | | | | | | H0220: 1, S0040: 1, | | |
| | | | | | | | S0218: 1, S0001: 1, | | |
| | | | | | | | S0282: 1, H0449: 1, | | |
| | | | | | | | H0125: 1, S0420: 1, | | |
| | | | | | | | L0005: 1, S0376: 1, | | |
| | | | | | | | S0045: 1, H0411: 1, | | |
| | | | | | | | H0431: 1, H0611: 1, | | |
| | | | | | | | H0586: 1, H0331: 1, | | |
| | | | | | | | H0632: 1, H0559: 1, | | |
| | | | | | | | H0635: 1, H0156: 1, | | |
| | | | | | | | L0021: 1, L0563: 1, | | |
| | | | | | | | H0309: 1, H0597: 1, | | |
| | | | | | | | H0530: 1, H0041: 1, | | |
| | | | | | | | H0563: 1, T0003: 1, | | |
| | | | | | | | H0015: 1, H0629: 1, | | |
| | | | | | | | H0354: 1, H0060: 1, | | |
| | | | | | | | S6028: 1, H0039: 1, | | |
| | | | | | | | H0644: 1, H0038: 1, | | |
| | | | | | | | T0067: 1, H0477: 1, | | |
| | | | | | | | H0488: 1, H0623: 1, | | |
| | | | | | | | H0560: 1, S0382: 1, | | |
| | | | | | | | S0438: 1, H0509: 1, | | |
| | | | | | | | H0641: 1, S0144: 1, | | |
| | | | | | | | S0142: 1, S0344: 1, | | |
| | | | | | | | S0210: 1, S0422: 1, | | |
| | | | | | | | L0598: 1, L0520: 1, | | |
| | | | | | | | L0762: 1, L0763: 1, | | |
| | | | | | | | L0767: 1, L0768: 1, | | |
| | | | | | | | L0526: 1, L0545: 1, | | |
| | | | | | | | S0053: 1, S0292: 1, | | |
| | | | | | | | S0152: 1, H0525: 1, | | |
| | | | | | | | H0579: 1, S0044: 1, | | |
| | | | | | | | H0134: 1, S3014: 1, | | |
| | | | | | | | S0206: 1, L0743: 1, | | |
| | | | | | | | L0754: 1, L0588: 1, | | |
| | | | | | | | L0589: 1, L0599: 1 and | | |
| | | | | | | | S0192: 1. | | |
| | | 672134 | 95 | 93-524 | 206 | Ala-41 to Gly-46. | | | |
| | | 718941 | 96 | 3-164 | 207 | Pro-6 to Val-12, | | | |
| | | | | | | Ala-24 to Ala-30. | | | |
| 28 | HE8DY76 | 1152570 | 38 | 234-1316 | 149 | Thr-13 to Glu-18, | AR054: 19, AR050: 3, | | |
| | | | | | | Arg-31 to Gly-45, | AR051: 2, AR061: 1, | | |
| | | | | | | Thr-55 to Pro-60. | AR089: 0 | | |
| | | | | | | | L0777: 5, L0759: 3, | | |
| | | | | | | | L0766: 2, H0411: 1, | | |
| | | | | | | | H0013: 1, H0051: 1, | | |
| | | | | | | | L0598: 1, L0666: 1, | | |
| | | | | | | | S0216: 1, L0747: 1, | | |
| | | | | | | | L0779: 1 and S0384: 1. | | |
| | | 877906 | 97 | 3-299 | 208 | | | | |
| | | 887614 | 98 | 1-381 | 209 | Asp-53 to Arg-61, | | | |
| | | | | | | Thr-90 to Glu-95, | | | |
| | | | | | | Arg-108 to Gly-122. | | | |
| 29 | HMWDB84 | 1111014 | 39 | 14-1123 | 150 | His-8 to Gly-18, | AR054: 26, AR050: | | |
| | | | | | | Gly-26 to Arg-34, | 23, AR051: 22, AR061: | | |
| | | | | | | Leu-43 to Ser-49, | 2, AR089: 1 | | |
| | | | | | | Ala-56 to Val-64, | H0521: 4, H0056: 2, | | |
| | | | | | | Arg-85 to Glu-92, | L0770: 2, L0761: 2, | | |
| | | | | | | Glu-109 to Asp-114, | L0766: 2, L0666: 2, | | |
| | | | | | | Val-144 to Arg-151, | H0265: 1, H0341: 1, | | |
| | | | | | | Thr-172 to Gln-177, | S0354: 1, H0580: 1, | | |
| | | | | | | His-215 to Glu-221, | S0046: 1, S0388: 1, | | |
| | | | | | | Asn-230 to Asn-236, | H0063: 1, H0633: 1, | | |
| | | | | | | Gln-299 to Thr-311, | L0769: 1, L0768: 1, | | |
| | | | | | | Pro-314 to Asn-321. | L0774: 1, L0775: 1, | | |
| | | | | | | | L0659: 1, H0658: 1, | | |
| | | | | | | | L0439: 1 and L0779: 1. | | |
| | | 899872 | 99 | 1-1035 | 210 | Gly-1 to Arg-9, | | | |
| | | | | | | Leu-18 to Ser-24, | | | |
| | | | | | | Ala-31 to Val-39, | | | |
| | | | | | | Arg-60 to Glu-67, | | | |
| | | | | | | Glu-84 to Asp-89, | | | |
| | | | | | | Val-119 to Arg-126, | | | |
| | | | | | | Thr-147 to Gln-152, | | | |
| | | | | | | His-190 to Glu-196, | | | |
| | | | | | | Asn-205 to Asn-211, | | | |
| | | | | | | Gln-274 to Thr-286, | | | |
| | | | | | | Pro-289 to Asn-296. | | | |
| | | 944569 | 100 | 568-825 | 211 | Ala-47 to Asp-54, | | | |
| | | | | | | Ser-67 to Pro-73. | | | |
| | | 944570 | 101 | 3-1034 | 212 | Gln-1 to Arg-8, | | | |
| | | | | | | Leu-17 to Ser-23, | | | |
| | | | | | | Ala-30 to Val-38, | | | |
| | | | | | | Arg-59 to Glu-66, | | | |
| | | | | | | Glu-83 to Asp-88, | | | |
| | | | | | | Val-118 to Arg-125, | | | |
| | | | | | | Thr-146 to Gln-151. | | | |
| 30 | HNECM88 | 974717 | 40 | 1-489 | 151 | Leu-9 to Arg-16, | AR089: 6, AR061: 5 | 19q13.3 | 113900, |
| | | | | | | Asp-44 to Ser-51, | L0749: 5, L0769: 3, | | 126340, |
| | | | | | | Pro-57 to Thr-64. | L0747: 3, L0758: 3, | | 126391, |
| | | | | | | | S0376: 2, H0635: 2, | | 130410, |
| | | | | | | | H0596: 2, L0775: 2, | | 134790, |
| | | | | | | | L0657: 2, L0666: 2, | | 138570, |
| | | | | | | | L0748: 2, L0731: 2, | | 160900, |
| | | | | | | | L0591: 2, L0608: 2, | | 173850, |
| | | | | | | | S0040: 1, S0358: 1, | | 258501, |
| | | | | | | | S0410: 1, L0021: 1, | | 600040, |
| | | | | | | | H0457: 1, H0179: 1, | | 602225, |
| | | | | | | | H0271: 1, H0553: 1, | | 602225, |
| | | | | | | | H0674: 1, H0090: 1, | | |
| | | | | | | | H0038: 1, H0412: 1, | | |
| | | | | | | | H0059: 1, L0762: 1, | | |
| | | | | | | | L0770: 1, L0796: 1, | | |
| | | | | | | | L0761: 1, L0764: 1, | | |
| | | | | | | | L0662: 1, L0767: 1, | | |
| | | | | | | | L0649: 1, L0804: 1, | | |
| | | | | | | | L0650: 1, L0806: 1, | | |
| | | | | | | | L0606: 1, L0783: 1, | | |
| | | | | | | | L0809: 1, L0665: 1, | | |
| | | | | | | | S0053: 1, H0659: 1, | | |
| | | | | | | | S0330: 1, L0602: 1, | | |
| | | | | | | | H0694: 1, S3014: 1, | | |
| | | | | | | | S0028: 1, L0740: 1, | | |
| | | | | | | | L0754: 1, L0756: 1, | | |
| | | | | | | | L0752: 1 and L0588: 1. | | |
| 31 | HOFNC80 | 835718 | 41 | 1-315 | 152 | Ser-9 to Lys-18. | AR051: 12, AR050: | | |
| | | | | | | | 12, AR054: 10, AR061: | | |
| | | | | | | | 2, AR089: 1, | | |
| | | | | | | | H0415: 1 | | |
| 32 | HE6GK65 | 1155065 | 42 | 2-1099 | 153 | Ser-53 to Gly-58, | AR054: 18, AR051: | | |
| | | | | | | Leu-76 to Cys-85, | 18, AR061: 4, AR050: | | |
| | | | | | | Pro-184 to Gly-189, | 3, AR089: 2 | | |
| | | | | | | His-223 to Val-231, | L0771: 2, H0295: 1, | | |
| | | | | | | Pro-236 to Phe-243, | S0418: 1, S0045: 1, | | |
| | | | | | | Arg-270 to Pro-287, | H0392: 1, H0497: 1, | | |
| | | | | | | Thr-301 to Ala-310, | H0618: 1, H0457: 1, | | |
| | | | | | | Pro-321 to Gly-328. | H0103: 1, H0617: 1, | | |
| | | | | | | | H0100: 1, L0761: 1, | | |
| | | | | | | | L0803: 1, L0805: 1, | | |
| | | | | | | | L0657: 1, L0791: 1, | | |
| | | | | | | | L0666: 1, H0520: 1, | | |
| | | | | | | | H0547: 1, H0519: 1, | | |
| | | | | | | | L0758: 1 and L0593: 1. | | |
| | | 969661 | 102 | 1-1071 | 213 | Ser-53 to Gly-58, | | | |
| | | | | | | Leu-76 to Cys-85, | | | |
| | | | | | | Leu-93 to Gln-98. | | | |
| 33 | HETGL74 | 947978 | 43 | 3-581 | 154 | | AR050: 47, AR051: 46, | | |
| | | | | | | | AR054: 39, AR089: 4, | | |
| | | | | | | | AR061: 2 | | |
| | | | | | | | H0046: 4 | | |
| 34 | HETIY94 | 1097305 | 44 | 1-1284 | 155 | | AR050: 22, AR054: | | |
| | | | | | | | 18, AR051: 11, AR089: | | |
| | | | | | | | 4, AR061: 3 | | |
| | | | | | | | L0751: 2, L0803: 1, | | |
| | | | | | | | L0805: 1, S0374: 1, | | |
| | | | | | | | H0658: 1 and L0747: 1. | | |
| | | 940755 | 103 | 1-612 | 214 | Arg-1 to Gly-6, | | | |
| | | | | | | Pro-44 to Glu-54, | | | |
| | | | | | | Ala-136 to Gln-141. | | | |
| 35 | HETLT82 | 883273 | 45 | 67-654 | 156 | Gln-21 to Lys-29, | AR061: 4, AR089: 2 | | |
| | | | | | | Leu-112 to Gly-123. | L0758: 7, H0046: 4, | | |
| | | | | | | | S0420: 1, S0052: 1 and | | |
| | | | | | | | S0216: 1. | | |
| 36 | HFIHF63 | 1136311 | 46 | 1-582 | 157 | Arg-8 to Asp-20, | AR061: 1, AR089: 1 | | |
| | | | | | | Gly-53 to Arg-63, | L0747: 3, S0250: 1, | | |
| | | | | | | Pro-84 to His-89, | L0777: 1, L0731: 1, | | |
| | | | | | | Ile-97 to Trp-104, | L0758: 1 and S0194: 1. | | |
| | | | | | | Ala-123 to Thr-135, | | | |
| | | | | | | Phe-170 to Arg-176, | | | |
| | | | | | | Pro-185 to His-194. | | | |
| | | 944246 | 104 | 2-610 | 215 | | | | |
| | | 973023 | 105 | 895-530 | 216 | Pro-6 to Cys-13, | | | |
| | | | | | | Pro-15 to Leu-20, | | | |
| | | | | | | Pro-47 to Gly-59, | | | |
| | | | | | | Asn-82 to Ser-88. | | | |
| 37 | HNGEO79 | 1129426 | 47 | 200-640 | 158 | Gln-41 to Asp-48, | AR061: 46, AR089: | | |
| | | | | | | Ser-67 to Leu-72, | 19, AR051: 12, AR054: | | |
| | | | | | | Thr-79 to Ser-84, | 10, AR050: 9 | | |
| | | | | | | Ile-96 to Ser-103, | S0052: 1 and L0758: 1. | | |
| | | | | | | Arg-120 to Ser-127. | | | |
| | | 951489 | 106 | 200-640 | 217 | Gln-41 to Asp-48, | | | |
| | | | | | | Ser-67 to Leu-72, | | | |
| | | | | | | Thr-79 to Ser-84, | | | |
| | | | | | | Ile-96 to Ser-103, | | | |
| | | | | | | Arg-120 to Ser-127. | | | |
| 38 | HHFCI36 | 844285 | 48 | 1-351 | 159 | | AR061: 4, AR089: 3 | | |
| | | | | | | | L0748: 10, H0050: 2, | | |
| | | | | | | | H0616: 2, L0657: 2, | | |
| | | | | | | | L0581: 2, H0294: 1, | | |
| | | | | | | | S0132: 1, S0222: 1, | | |
| | | | | | | | H0431: 1, H0597: 1, | | |
| | | | | | | | H0172: 1, H0123: 1, | | |
| | | | | | | | H0014: 1, L0177: 1, | | |
| | | | | | | | S0003: 1, H0428: 1, | | |
| | | | | | | | H0124: 1, H0040: 1, | | |
| | | | | | | | L0065: 1, S0422: 1, | | |
| | | | | | | | L0378: 1, L0438: 1, | | |
| | | | | | | | H0519: 1, H0690: 1, | | |
| | | | | | | | S3012: 1, L0747: 1, | | |
| | | | | | | | L0777: 1, S0106: 1, | | |
| | | | | | | | S0011: 1 and S0026: 1. | | |
| 39 | HHPDX35 | 1223118 | 49 | 674-2233 | 160 | His-5 to Met-11, | AR050: 634, AR051: | | |
| | | | | | | Gln-38 to Thr-43, | 564, AR054: 414, | | |
| | | | | | | Asn-130 to Ser-136, | AR089: 1, AR061: 0 | | |
| | | | | | | Pro-189 to Thr-197, | L0748: 4, L0105: 2, | | |
| | | | | | | Ser-200 to Gly-205, | H0031: 2, H0494: 2, | | |
| | | | | | | Arg-235 to Ser-242, | L0637: 2, L0662: 2, | | |
| | | | | | | Asn-245 to Asn-250, | L0803: 2, L0666: 2, | | |
| | | | | | | Ala-266 to Tyr-272, | H0624: 1, H0171: 1, | | |
| | | | | | | Gln-295 to Gly-300, | L0005: 1, L0717: 1, | | |
| | | | | | | Ser-339 to Cys-349, | H0411: 1, H0587: 1, | | |
| | | | | | | Pro-363 to Cys-374, | H0485: 1, H0105: 1, | | |
| | | | | | | His-376 to Phe-386, | H0051: 1, H0622: 1, | | |
| | | | | | | Ser-402 to Met-411, | L0363: 1, L0364: 1, | | |
| | | | | | | Ala-445 to His-450, | L0389: 1, L0659: 1, | | |
| | | | | | | Ser-455 to Arg-466, | S0374: 1, H0670: 1, | | |
| | | | | | | Ala-472 to Glu-495, | S0028: 1, L0743: 1, | | |
| | | | | | | Gln-503 to Gln-514. | L0754: 1 and L0758: 1. | | |
| | | 810391 | 107 | 3-350 | 218 | | | | |
| | | 948421 | 108 | 3-680 | 219 | Gln-56 to Gln-61, | | | |
| | | | | | | Ser-149 to Met-154. | | | |
| | | 956581 | 109 | 199-309 | 220 | | | | |
| 40 | HIBEV89 | 922757 | 50 | 300-1103 | 161 | | AR089: 0, AR061: 0 | | |
| | | | | | | | H0620: 3, S0007: 1, | | |
| | | | | | | | L0157: 1, H0012: 1, | | |
| | | | | | | | T0010: 1 and H0008: 1. | | |
| 41 | HLDBL95 | 811269 | 51 | 157-444 | 162 | | AR050: 24, AR089: 6, | | |
| | | | | | | | AR061: 2, AR051: 0 | | |
| | | | | | | | L0794: 3, L0758: 3, | | |
| | | | | | | | H0135: 2, H0509: 2, | | |
| | | | | | | | L0764: 2, L0803: 2, | | |
| | | | | | | | L0517: 2, L0809: 2, | | |
| | | | | | | | L0438: 2, L0748: 2, | | |
| | | | | | | | L0749: 2, S0418: 1, | | |
| | | | | | | | S0356: 1, S0358: 1, | | |
| | | | | | | | S0010: 1, H0024: 1, | | |
| | | | | | | | H0051: 1, H0428: 1, | | |
| | | | | | | | T0006: 1, L0372: 1, | | |
| | | | | | | | L0774: 1, L0775: 1, | | |
| | | | | | | | L0787; 1, H0547: 1, | | |
| | | | | | | | S0152: 1, L0605: 1 and | | |
| | | | | | | | L0592: 1. | | |
| 42 | HLDBM06 | 1189003 | 52 | 65-1150 | 163 | Ser-16 to Trp-21, | AR089: 3, AR061: 1 | | |
| | | | | | | Lys-49 to Pro-54, | H0393: 2, L0766: 2, | | |
| | | | | | | Ser-76 to Ser-81, | S0278: 1, H0486: 1, | | |
| | | | | | | Phe-89 to His-94, | H0124: 1, H0509: 1 and | | |
| | | | | | | Gly-96 to Gly-102, | S0126: 1. | | |
| | | | | | | Ala-114 to Cys-122, | | | |
| | | | | | | Cys-129 to Phe-136, | | | |
| | | | | | | Ser-191 to Ala-198, | | | |
| | | | | | | Thr-203 to Glu-212, | | | |
| | | | | | | Ala-217 to Asn-223, | | | |
| | | | | | | Ser-235 to Ser-240, | | | |
| | | | | | | Pro-269 to Lys-275, | | | |
| | | | | | | Arg-278 to Asp-287, | | | |
| | | | | | | Lys-301 to Ser-307, | | | |
| | | | | | | Ala-320 to Glu-329, | | | |
| | | | | | | Ala-341 to Glu-346, | | | |
| | | | | | | Asp-349 to Gly-354. | | | |
| | | 878341 | 110 | 65-550 | 221 | Ser-16 to Trp-21, | | | |
| | | | | | | Lys-49 to Pro-54, | | | |
| | | | | | | Ser-76 to Ser-81, | | | |
| | | | | | | Phe-89 to His-94, | | | |
| | | | | | | Gly-96 to Gly-102, | | | |
| | | | | | | Ala-114 to Cys-122, | | | |
| | | | | | | Cys-129 to Phe-136, | | | |
| | | | | | | Tyr-152 to Ile-162. | | | |
| 43 | HLHDR39 | 523499 | 53 | 238-438 | 164 | | AR061: 7, AR089: 3 | | |
| | | | | | | | H0024: 2 | | |
| 44 | HLJDQ79 | 774667 | 54 | 2-292 | 165 | Arg-1 to Val-11. | AR089: 5, AR061: 2 | | |
| | | | | | | | L0439: 11, L0752: 7, | | |
| | | | | | | | L0777: 6, H0046: 4, | | |
| | | | | | | | L0471: 4, L0771: 4, | | |
| | | | | | | | L0749: 4, L0731: 4, | | |
| | | | | | | | L0757: 4, H0156: 3, | | |
| | | | | | | | S0010: 3, L0598: 3, | | |
| | | | | | | | L0774: 3, L0775: 3, | | |
| | | | | | | | L0776: 3, S0126: 3, | | |
| | | | | | | | L0750: 3, L0758: 3, | | |
| | | | | | | | L0785: 2, S0360: 2, | | |
| | | | | | | | S0046: 2, H0415: 2, | | |
| | | | | | | | H0596: 2, T0115: 2, | | |
| | | | | | | | H0428: 2, H0494: 2, | | |
| | | | | | | | S0422: 2, L0662: 2, | | |
| | | | | | | | L0804: 2, H0519: 2, | | |
| | | | | | | | L0748: 2, L0740: 2, | | |
| | | | | | | | L0756: 2, L0592: 2, | | |
| | | | | | | | L0599: 2, S0212: 1, | | |
| | | | | | | | H0459: 1, H0638: 1, | | |
| | | | | | | | S0420: 1, H0619: 1, | | |
| | | | | | | | H0393: 1, S0300: 1, | | |
| | | | | | | | H0431: 1, H0455: 1, | | |
| | | | | | | | H0587: 1, H0497: 1, | | |
| | | | | | | | H0574: 1, H0013: 1, | | |
| | | | | | | | S0346: 1, L0106: 1, | | |
| | | | | | | | H0263: 1, H0327: 1, | | |
| | | | | | | | H0024: 1, H0051: 1, | | |
| | | | | | | | S0388: 1, H0083: 1, | | |
| | | | | | | | H0239: 1, H0355: 1, | | |
| | | | | | | | H0375: 1, H0622: 1, | | |
| | | | | | | | L0483: 1, H0628: 1, | | |
| | | | | | | | H0598: 1, S0036: 1, | | |
| | | | | | | | H0135: 1, H0634: 1, | | |
| | | | | | | | T0067: 1, H0379: 1, | | |
| | | | | | | | H0272: 1, H0056: 1, | | |
| | | | | | | | H0561: 1, S0464: 1, | | |
| | | | | | | | UNKWN: 1, L0763: 1, | | |
| | | | | | | | L0638: 1, L0637: 1, | | |
| | | | | | | | L0772: 1, L0372: 1, | | |
| | | | | | | | L0764: 1, L0521: 1, | | |
| | | | | | | | L0375: 1, L0806: 1, | | |
| | | | | | | | L0653: 1, L0655: 1, | | |
| | | | | | | | L0657: 1, L0659: 1, | | |
| | | | | | | | L0545: 1, L0528: 1, | | |
| | | | | | | | L0666: 1, L0663: 1, | | |
| | | | | | | | H0144: 1, H0702: 1, | | |
| | | | | | | | S0374: 1, H0520: 1, | | |
| | | | | | | | H0689: 1, H0648: 1, | | |
| | | | | | | | H0539: 1, S0152: 1, | | |
| | | | | | | | S0432: 1, L0754: 1, | | |
| | | | | | | | L0779: 1, L0755: 1, | | |
| | | | | | | | L0596: 1, L0588: 1, | | |
| | | | | | | | L0362: 1, H0667: 1, | | |
| | | | | | | | H0423: 1 and H0352: 1. | | |
| 45 | HLWAV41 | 1156377 | 55 | 2-1024 | 166 | Pro-43 to Thr-50, | AR089: 10, AR061: 5 | | |
| | | | | | | Arg-163 to Ser-168. | H0553: 2, H0619: 1, | | |
| | | | | | | | H0030: 1, L0763: 1 and | | |
| | | | | | | | L0592: 1. | | |
| | | 786224 | 111 | 1-420 | 222 | Pro-43 to Thr-50. | | | |
| 46 | HFPEL47 | 943750 | 56 | 3-605 | 167 | Leu-22 to Lys-28, | AR061: 3, AR089: 2 | Xp22.1-p21.3 | 30018, |
| | | | | | | Leu-78 to Trp-84, | S0222: 1 | | 300075, |
| | | | | | | Glu-122 to Arg-128. | | | 300077, |
| | | | | | | | | | 300200, |
| | | | | | | | | | 301200, |
| | | | | | | | | | 301220, |
| | | | | | | | | | 302350, |
| | | | | | | | | | 306000, |
| | | | | | | | | | 306000, |
| | | | | | | | | | 306100, |
| | | | | | | | | | 307030, |
| | | | | | | | | | 307800, |
| | | | | | | | | | 309470, |
| | | | | | | | | | 309510, |
| | | | | | | | | | 309585, |
| | | | | | | | | | 311770, |
| | | | | | | | | | 312040, |
| | | | | | | | | | 312170, |
| | | | | | | | | | 312612, |
| | | | | | | | | | 312700, |
| | | | | | | | | | 313400 |
| 47 | HHPTE06 | 1172242 | 57 | 468-923 | 168 | | AR504: 44, AR050: | | |
| | | | | | | | 38, AR051: 31, AR061: | | |
| | | | | | | | 4, AR089: 2 | | |
| | | | | | | | L0803: 4, L0756: 4, | | |
| | | | | | | | L0777: 2, S0242: 4, | | |
| | | | | | | | H0171: 2, S0212: 4, | | |
| | | | | | | | S0222: 2, S0010: 2, | | |
| | | | | | | | S0250: 2, H0144: 2, | | |
| | | | | | | | L0731: 2, H0170: 1, | | |
| | | | | | | | H0341: 1, L0021: 1, | | |
| | | | | | | | H0581: 1, H0457: 1, | | |
| | | | | | | | H0563: 1, H0567: 1, | | |
| | | | | | | | S0050: 1, S0214: 1, | | |
| | | | | | | | S0366: 1, H0551: 1, | | |
| | | | | | | | T0004: 1, S0038: 1, | | |
| | | | | | | | S0112: 1, H0538: 1, | | |
| | | | | | | | L0796: 1, L0768: 1, | | |
| | | | | | | | L0774: 1, L0659: 1, | | |
| | | | | | | | L0530: 1, L0666: 1, | | |
| | | | | | | | L0366: 1 and H0506: 1. | | |
| | | 934755 | 112 | 2-190 | 223 | Leu-20 to Tyr-25, | | | |
| | | | | | | Thr-35 to Tyr-40, | | | |
| | | | | | | Gln-45 to Thr-52. | | | |
| 48 | HLMAC70 | 1125687 | 58 | 596-1492 | 169 | | AR061: 9, AR089: 3 | | |
| | | | | | | | H0254: 3, H0543: 2, | | |
| | | | | | | | H0255: 1, H0589: 1, | | |
| | | | | | | | H0614: 1, H0050: 1, | | |
| | | | | | | | L0607: 1, L0663: 1 and | | |
| | | | | | | | H0539: 1. | | |
| | | 795928 | 113 | 1-246 | 224 | Thr-18 to Thr-33. | | | |
| 49 | HLWFG82 | 929647 | 59 | 1-558 | 170 | Pro-4 to Pro-18, | AR054: 2, AR051: 1, | | |
| | | | | | | Gly-81 to Pro-87, | AR089: 1, AR050: 1, | | |
| | | | | | | Ala-110 to Ala-118, | AR061: 0 | | |
| | | | | | | Gln-127 to Gly-143, | H0651: 59, L0751: 5, | | |
| | | | | | | Arg-168 to Asp-176. | L0438: 4, L0774: 3, | | |
| | | | | | | | L0439: 3, L0748: 2, | | |
| | | | | | | | L0779: 2, L0752: 2, | | |
| | | | | | | | L0755: 2, L0595: 2, | | |
| | | | | | | | H0295: 1, H0009: 1, | | |
| | | | | | | | T0010: 1, H0553: 1, | | |
| | | | | | | | H0617: 1, H0163: 1, | | |
| | | | | | | | H0102: 1, H0494: 1, | | |
| | | | | | | | L0770: 1, L0662: 1, | | |
| | | | | | | | L0375: 1, L0806: 1, | | |
| | | | | | | | L0776: 1, L0657: 1, | | |
| | | | | | | | L0659: 1, L0792: 1, | | |
| | | | | | | | L0666: 1, L0663: 1, | | |
| | | | | | | | L0664: 1, L0665: 1, | | |
| | | | | | | | L0352: 1, H0648: 1, | | |
| | | | | | | | L0740: 1, L0749: 1, | | |
| | | | | | | | L0757: 1, L0361: 1, | | |
| | | | | | | | L0603: 1 and S0042: 1. | | |
| 50 | HSTBK14 | 887715 | 60 | 3-392 | 171 | | AR061: 3, AR089: 1 | | |
| | | | | | | | H0068: 1 and H0547: 1. | | |
| 51 | HE8EI09 | 915042 | 61 | 2-493 | 172 | Glu-20 to Ala-25, | AR089: 5, AR061: 3 | | |
| | | | | | | Val-60 to Gln-77, | H0556: 14, L0439: 14, | | |
| | | | | | | Gln-85 to Val-91, | H0265: 12, L0747: 10, | | |
| | | | | | | Gln-103 to Ile-109. | H0529: 9, H0144: 9, | | |
| | | | | | | | H0657: 8, H0333: 8, | | |
| | | | | | | | L0731: 8, H0521: 7, | | |
| | | | | | | | L0748: 7, H0341: 6, | | |
| | | | | | | | H0135: 6, L0770: 6, | | |
| | | | | | | | L0776: 6, H0547: 6, | | |
| | | | | | | | H0650: 5, H0024: 5, | | |
| | | | | | | | H0040: 5, H0494: 5, | | |
| | | | | | | | L0766: 5, L0657: 5, | | |
| | | | | | | | L0666: 5, S0152: 5, | | |
| | | | | | | | L0740: 5, L0779: 5, | | |
| | | | | | | | L0758: 5, H0542: 5, | | |
| | | | | | | | S0418: 4, S0045: 4, | | |
| | | | | | | | H0318: 4, H0123: 4, | | |
| | | | | | | | S0022: 4, H0032: 4, | | |
| | | | | | | | H0124: 4, H0413: 4, | | |
| | | | | | | | L0764: 4, L0375: 4, | | |
| | | | | | | | L0659: 4, L0809: 4, | | |
| | | | | | | | L0749: 4, L0752: 4, | | |
| | | | | | | | L0595: 4, H0543: 4, | | |
| | | | | | | | H0295: 3, S0212: 3, | | |
| | | | | | | | S0420: 3, H0549: 3, | | |
| | | | | | | | H0013: 3, H0052: 3, | | |
| | | | | | | | H0251: 3, L0471: 3, | | |
| | | | | | | | H0012: 3, H0594: 3, | | |
| | | | | | | | H0039: 3, H0622: 3, | | |
| | | | | | | | H0644: 3, H0551: 3, | | |
| | | | | | | | L0475: 3, L0369: 3, | | |
| | | | | | | | L0769: 3, L0521: 3, | | |
| | | | | | | | L0804: 3, L0774: 3, | | |
| | | | | | | | L0663: 3, S0126: 3, | | |
| | | | | | | | S0044: 3, S0027: 3, | | |
| | | | | | | | L0750: 3, H0445: 3, | | |
| | | | | | | | H0422: 3, T0002: 2, | | |
| | | | | | | | S0218: 2, H0662: 2, | | |
| | | | | | | | S0356: 2, S0360: 2, | | |
| | | | | | | | H0069: 2, H0599: 2, | | |
| | | | | | | | H0575: 2, H0618: 2, | | |
| | | | | | | | H0581: 2, H0620: 2, | | |
| | | | | | | | H0373: 2, H0083: 2, | | |
| | | | | | | | H0266: 2, H0271: 2, | | |
| | | | | | | | H0687: 2, S0250: 2, | | |
| | | | | | | | H0615: 2, L0194: 2, | | |
| | | | | | | | H0553: 2, H0090: 2, | | |
| | | | | | | | H0038: 2, H0059: 2, | | |
| | | | | | | | H0100: 2, T0041: 2, | | |
| | | | | | | | H0561: 2, L0761: 2, | | |
| | | | | | | | L0372: 2, L0646: 2, | | |
| | | | | | | | L0771: 2, L0662: 2, | | |
| | | | | | | | L0363: 2, L0649: 2, | | |
| | | | | | | | L0655: 2, L0783: 2, | | |
| | | | | | | | L0438: 2, H0520: 2, | | |
| | | | | | | | H0593: 2, H0435: 2, | | |
| | | | | | | | H0670: 2, H0648: 2, | | |
| | | | | | | | S0378: 2, S3014: 2, | | |
| | | | | | | | S0028: 2, L0754: 2, | | |
| | | | | | | | L0753: 2, L0757: 2, | | |
| | | | | | | | L0759: 2, L0596: 2, | | |
| | | | | | | | L0605: 2, L0591: 2, | | |
| | | | | | | | L0599: 2, L0608: 2, | | |
| | | | | | | | L0593: 2, H0423: 2, | | |
| | | | | | | | H0506: 2, L0448: 1, | | |
| | | | | | | | H0224: 1, H0656: 1, | | |
| | | | | | | | S0116: 1, S0001: 1, | | |
| | | | | | | | S0030: 1, H0255: 1, | | |
| | | | | | | | H0661: 1, H0663: 1, | | |
| | | | | | | | H0125: 1, S0354: 1, | | |
| | | | | | | | S0358: 1, S0444: 1, | | |
| | | | | | | | S0468: 1, S0132: 1, | | |
| | | | | | | | H0619: 1, H0411: 1, | | |
| | | | | | | | S0278: 1, S0222: 1, | | |
| | | | | | | | H0613: 1, H0592: 1, | | |
| | | | | | | | S0005: 1, H0497: 1, | | |
| | | | | | | | H0559: 1, H0485: 1, | | |
| | | | | | | | H0486: 1, T0039: 1, | | |
| | | | | | | | L0021: 1, S0010: 1, | | |
| | | | | | | | H0390: 1, S0049: 1, | | |
| | | | | | | | H0596: 1, H0597: 1, | | |
| | | | | | | | H0457: 1, H0041: 1, | | |
| | | | | | | | H0009: 1, N0006: 1, | | |
| | | | | | | | H0566: 1, H0050: 1, | | |
| | | | | | | | H0023: 1, H0014: 1, | | |
| | | | | | | | S0362: 1, H0051: 1, | | |
| | | | | | | | S0048: 1, T0010: 1, | | |
| | | | | | | | S6028: 1, H0028: 1, | | |
| | | | | | | | S0314: 1, H0688: 1, | | |
| | | | | | | | H0428: 1, H0617: 1, | | |
| | | | | | | | H0606: 1, H0673: 1, | | |
| | | | | | | | H0169: 1, H0674: 1, | | |
| | | | | | | | L0455: 1, H0068: 1, | | |
| | | | | | | | S0036: 1, H0163: 1, | | |
| | | | | | | | H0591: 1, H0087: 1, | | |
| | | | | | | | H0116: 1, H0477: 1, | | |
| | | | | | | | H0272: 1, H0412: 1, | | |
| | | | | | | | L0564: 1, H0560: 1, | | |
| | | | | | | | S0150: 1, H0538: 1, | | |
| | | | | | | | S0422: 1, S0002: 1, | | |
| | | | | | | | L0640: 1, L0763: 1, | | |
| | | | | | | | L0637: 1, L0667: 1, | | |
| | | | | | | | L0772: 1, L0373: 1, | | |
| | | | | | | | L0800: 1, L0641: 1, | | |
| | | | | | | | L0374: 1, L0768: 1, | | |
| | | | | | | | L0381: 1, L0803: 1, | | |
| | | | | | | | L0775: 1, L0526: 1, | | |
| | | | | | | | L0518: 1, L0782: 1, | | |
| | | | | | | | L0383: 1, L0382: 1, | | |
| | | | | | | | L0519: 1, L0544: 1, | | |
| | | | | | | | L0789: 1, L0791: 1, | | |
| | | | | | | | L0664: 1, H0698: 1, | | |
| | | | | | | | S0374: 1, S0148: 1, | | |
| | | | | | | | H0519: 1, H0689: 1, | | |
| | | | | | | | H0658: 1, S0330: 1, | | |
| | | | | | | | L0602: 1, H0522: 1, | | |
| | | | | | | | S0404: 1, S0392: 1, | | |
| | | | | | | | H0627: 1, L0742: 1, | | |
| | | | | | | | L0751: 1, L0756: 1, | | |
| | | | | | | | L0777: 1, S0434: 1, | | |
| | | | | | | | L0592: 1, L0361: 1, | | |
| | | | | | | | L0366: 1, S0011: 1, | | |
| | | | | | | | H0668: 1, H0667: 1, | | |
| | | | | | | | S0424: 1, S0462: 1, | | |
| | | | | | | | H0008: 1 and H0352: 1. | | |
| 52 | HHAUD86 | 944835 | 62 | 3-578 | 173 | Asn-33 to Leu-41, | AR089: 2, AR061: 1 | | |
| | | | | | | His-101 to Gly-108, | H0617: 14, H0124: 14, | | |
| | | | | | | Pro-110 to Asp-115, | L0747: 10, H0545: 8, | | |
| | | | | | | Ser-123 to Tyr-129, | L0757: 7, L0743: 6, | | |
| | | | | | | Leu-169 to Leu-176. | L0731: 6, L0758: 6, | | |
| | | | | | | | L0777: 5, S0360: 4, | | |
| | | | | | | | H0544: 4, H0024: 4, | | |
| | | | | | | | L0803: 4, H0170: 3, | | |
| | | | | | | | S0040: 3, H0333: 3, | | |
| | | | | | | | H0309: 3, L0771: 3, | | |
| | | | | | | | S0212: 2, S0358: 2, | | |
| | | | | | | | H0549: 2, H0550: 2, | | |
| | | | | | | | H0392: 2, H0253: 2, | | |
| | | | | | | | H0123: 2, H0620: 2, | | |
| | | | | | | | H0181: 2, L0769: 2, | | |
| | | | | | | | H0144: 2, L0565: 2, | | |
| | | | | | | | S0027: 2, L0751: 2, | | |
| | | | | | | | L0786: 2, L0780: 2, | | |
| | | | | | | | H0352: 2, H0624: 1, | | |
| | | | | | | | H0381: 1, S0418: 1, | | |
| | | | | | | | S0420: 1, H0208: 1, | | |
| | | | | | | | H0587: 1, H0427: 1, | | |
| | | | | | | | H0421: 1, H0150: 1, | | |
| | | | | | | | H0041: 1, H0012: 1, | | |
| | | | | | | | H0284: 1, S0250: 1, | | |
| | | | | | | | H0252: 1, H0328: 1, | | |
| | | | | | | | H0688: 1, H0428: 1, | | |
| | | | | | | | H0553: 1, H0628: 1, | | |
| | | | | | | | S0364: 1, H0163: 1, | | |
| | | | | | | | H0038: 1, H0087: 1, | | |
| | | | | | | | L0770: 1, L0637: 1, | | |
| | | | | | | | L0630: 1, L0662: 1, | | |
| | | | | | | | L0804: 1, L0774: 1, | | |
| | | | | | | | L0653: 1, L0657: 1, | | |
| | | | | | | | L0634: 1, L0659: 1, | | |
| | | | | | | | L0517: 1, L0783: 1, | | |
| | | | | | | | L0666: 1, L0665: 1, | | |
| | | | | | | | S0374: 1, H0520: 1, | | |
| | | | | | | | S0126: 1, H0682: 1, | | |
| | | | | | | | H0672: 1, S3014: 1, | | |
| | | | | | | | S0028: 1, L0744: 1, | | |
| | | | | | | | L0754: 1, L0750: 1, | | |
| | | | | | | | L0759: 1, S0260: 1, | | |
| | | | | | | | H0653: 1, S0194: 1 and | | |
| | | | | | | | L0600: 1. | | |
| 53 | HNTRL43 | 1126541 | 63 | 929-60 | 174 | Ser-53 to Leu-68, | AR089: 1, AR061: 1 | | |
| | | | | | | Val-73 to Ser-78, | L0659: 3, L0439: 3, | | |
| | | | | | | Gln-98 to Pro-104, | L0592: 3, S0007: 2, | | |
| | | | | | | His-113 to Arg-122, | L0775: 2, L0809: 2, | | |
| | | | | | | Arg-138 to Gly-144, | L0759: 2, H0619: 1, | | |
| | | | | | | Gly-154 to Gly-160, | H0455: 1, H0012: 1, | | |
| | | | | | | Gln-174 to Glu-179, | H0620: 1, T0010: 1, | | |
| | | | | | | Gln-182 to Pro-189, | L0769: 1, L0662: 1, | | |
| | | | | | | Pro-227 to Thr-232, | L0794: 1, L0804: 1, | | |
| | | | | | | Gly-264 to Pro-273, | L0378: 1, L0805: 1, | | |
| | | | | | | Pro-283 to Thr-290. | L0791: 1, L0663: 1, | | |
| | | | | | | | L0665: 1, H0144: 1, | | |
| | | | | | | | L0438: 1, H0547: 1, | | |
| | | | | | | | H0670: 1, L0741: 1 and | | |
| | | | | | | | L0779: 1. | | |
| | | 835705 | 114 | 86-427 | 225 | His-1 to Asp-11. | | | |
| 54 | HPIBQ37 | 884289 | 64 | 2-424 | 175 | Ile-47 to Val-53, | AR089: 4, AR061: 2 | | |
| | | | | | | Phe-71 to Thr-76, | S0150: 2 | | |
| | | | | | | Ser-105 to Thr-113, | | | |
| | | | | | | Glu-121 to Ser-129. | | | |
| 55 | HEEAR06 | 1126471 | 65 | 532-1020 | 176 | Ser-1 to Gly-10, | AR061: 3, AR089: 2 | | |
| | | | | | | Gln-103 to Pro-108. | L0759: 3, L0604: 3, | | |
| | | | | | | | L0717: 2, H0549: 2, | | |
| | | | | | | | L0748: 2, S0366: 1 and | | |
| | | | | | | | L0749: 1. | | |
| | | 934722 | 115 | 51-572 | 226 | Ala-32 to Ala-38, | | | |
| | | | | | | Lys-73 to Glu-79. | | | |
| 56 | HETEY43 | 1228508 | 66 | 173-454 | 177 | Glu-1 to Arg-25, | AR061: 1, AR089: 0 | | |
| | | | | | | Asp-57 to Lys-64, | L0758: 19, L0777: 16, | | |
| | | | | | | Pro-88 to Ser-94. | L0750: 14, L0747: 13, | | |
| | | | | | | | L0748: 10, H0692: 9, | | |
| | | | | | | | L0775: 6, L0749: 6, | | |
| | | | | | | | L0766: 5, L0774: 5, | | |
| | | | | | | | L0740: 5, L0752: 5, | | |
| | | | | | | | L0764: 4, L0662: 4, | | |
| | | | | | | | S0126: 4, L0601: 4, | | |
| | | | | | | | H0624: 3, H0052: 3, | | |
| | | | | | | | H0090: 3, H0560: 3, | | |
| | | | | | | | L0769: 3, L0768: 3, | | |
| | | | | | | | L0783: 3, L0756: 3, | | |
| | | | | | | | L0755: 3, H0171: 2, | | |
| | | | | | | | S0007: 2, H0497: 2, | | |
| | | | | | | | H0486: 2, H0316: 2, | | |
| | | | | | | | H0494: 2, S0150: 2, | | |
| | | | | | | | L0776: 2, L0655: 2, | | |
| | | | | | | | L0659: 2, L0665: 2, | | |
| | | | | | | | S0027: 2, L0759: 2, | | |
| | | | | | | | L0588: 2, H0136: 2, | | |
| | | | | | | | H0542: 2, H0341: 1, | | |
| | | | | | | | H0664: 1, H0458: 1, | | |
| | | | | | | | H0125: 1, S0418: 1, | | |
| | | | | | | | S0376: 1, S0360: 1, | | |
| | | | | | | | H0489: 1, S0046: 1, | | |
| | | | | | | | S0132: 1, S0300: 1, | | |
| | | | | | | | H0351: 1, H0601: 1, | | |
| | | | | | | | H0632: 1, H0013: 1, | | |
| | | | | | | | H0244: 1, H0069: 1, | | |
| | | | | | | | H0427: 1, H0318: 1, | | |
| | | | | | | | H0581: 1, H0421: 1, | | |
| | | | | | | | H0204: 1, H0327: 1, | | |
| | | | | | | | H0046: 1, S0388: 1, | | |
| | | | | | | | S0051: 1, S6028: 1, | | |
| | | | | | | | H0687: 1, S0003: 1, | | |
| | | | | | | | H0252: 1, H0615: 1, | | |
| | | | | | | | H0428: 1, T0006: 1, | | |
| | | | | | | | H0553: 1, L0055: 1, | | |
| | | | | | | | H0038: 1, H0551: 1, | | |
| | | | | | | | H0059: 1, H0100: 1, | | |
| | | | | | | | H0647: 1, S0142: 1, | | |
| | | | | | | | S0344: 1, H0529: 1, | | |
| | | | | | | | L0763: 1, L0770: 1, | | |
| | | | | | | | L0639: 1, L0761: 1, | | |
| | | | | | | | L0667: 1, L0641: 1, | | |
| | | | | | | | L0374: 1, L0767: 1, | | |
| | | | | | | | L0375: 1, L0383: 1, | | |
| | | | | | | | L0647: 1, L0792: 1, | | |
| | | | | | | | L0663: 1, L0664: 1, | | |
| | | | | | | | H0520: 1, H0547: 1, | | |
| | | | | | | | H0689: 1, H0682: 1, | | |
| | | | | | | | H0670: 1, S0378: 1, | | |
| | | | | | | | S0380: 1, H0555: 1, | | |
| | | | | | | | H0478: 1, S3012: 1, | | |
| | | | | | | | L0742: 1, L0439: 1, | | |
| | | | | | | | L0754: 1, L0731: 1, | | |
| | | | | | | | L0592: 1, L0608: 1, | | |
| | | | | | | | H0543: 1, H0422: 1 and | | |
| | | | | | | | H0352: 1. | | |
| | | 911466 | 116 | 174-575 | 227 | | | | |
| 57 | HBJJX53 | 1194288 | 67 | 600-1 | 178 | Met-3 to Thr-19, | AR061: 6, AR089: 4 | | |
| | | | | | | Gly-45 to Leu-52, | H0318: 1 | | |
| | | | | | | Pro-59 to Arg-78, | | | |
| | | | | | | Arg-86 to Leu-101, | | | |
| | | | | | | Gln-144 to Cys-149, | | | |
| | | | | | | Ile-156 to Gln-161. | | | |
| | | 835733 | 117 | 79-393 | 228 | | | | |
| 58 | HBZSH19 | 578224 | 68 | 2-319 | 179 | Lys-25 to Gly-35, | AR089: 1, AR061: 0 | | |
| | | | | | | Thr-89 to Asn-98. | S0007: 2, H0661: 1, | | |
| | | | | | | | L0371: 1, L0764: 1, | | |
| | | | | | | | L0662: 1, L0387: 1, | | |
| | | | | | | | S0190: 1, S3012: 1, | | |
| | | | | | | | L0439: 1, L0750: 1, | | |
| | | | | | | | L0777: 1 and L0595: 1. | | |
| 59 | HCEII41 | 1160558 | 69 | 2-1819 | 180 | Pro-273 to Cys-278, | AR061: 1, AR089: 0 | | |
| | | | | | | Leu-399 to Ser-405, | L0439: 5, H0052: 2, | | |
| | | | | | | Glu-416 to Pro-430, | L0592: 2, H0254: 1, | | |
| | | | | | | Ser-433 to Thr-441, | L0534: 1, S0222: 1, | | |
| | | | | | | Asp-463 to Ser-471, | H0013: 1, H0599: 1, | | |
| | | | | | | Leu-503 to Ser-511, | S0010: 1, T0010: 1, | | |
| | | | | | | Ile-558 to Pro-565, | H0408: 1, S6028: 1, | | |
| | | | | | | Thr-572 to Asn-578, | L0351: 1, L0435: 1, | | |
| | | | | | | Thr-595 to Gln-602. | L0803: 1, L0804: 1, | | |
| | | | | | | | L0663: 1, S0216: 1, | | |
| | | | | | | | L0352: 1, L0743: 1, | | |
| | | | | | | | L0747: 1, L0750: 1 and | | |
| | | | | | | | H0595: 1. | | |
| | | 944433 | 118 | 325-1167 | 229 | | | | |
| 60 | HCEMK49 | 948028 | 70 | 3-500 | 181 | Leu-39 to Gly-45, | AR089: 3, AR061: 1 | | |
| | | | | | | His-53 to Ser-59, | S0007: 4, H0052: 1, | | |
| | | | | | | Gly-63 to Arg-70. | H0041: 1, N0006: 1 and | | |
| | | | | | | | S0038: 1. | | |
| 61 | HCGME42 | 768283 | 71 | 3-470 | 182 | Pro-70 to Asp-76, | AR089: 6, AR061: 3 | | |
| | | | | | | Val-115 to Gly-121, | H0457: 23, H0521: 6, | | |
| | | | | | | Pro-146 to Gly-151. | H0637: 5, H0580: 4, | | |
| | | | | | | | L0731: 4, H0402: 3, | | |
| | | | | | | | H0581: 3, L0776: 3, | | |
| | | | | | | | S0052: 3, H0423: 3, | | |
| | | | | | | | L0662: 2, L0748: 2, | | |
| | | | | | | | H0543: 2, H0265: 1, | | |
| | | | | | | | H0664: 1, H0306: 1, | | |
| | | | | | | | H0459: 1, S0358: 1, | | |
| | | | | | | | H0393: 1, H0587: 1, | | |
| | | | | | | | L0021: 1, H0575: 1, | | |
| | | | | | | | H0439: 1, H0050: 1, | | |
| | | | | | | | L0163: 1, L0648: 1, | | |
| | | | | | | | L0775: 1, L0658: 1, | | |
| | | | | | | | L0659: 1, H0701: 1, | | |
| | | | | | | | S0380: 1, H0576: 1, | | |
| | | | | | | | L0750: 1 and L0599: 1. | | |
| 62 | HDAAN31 | 1207184 | 72 | 32-913 | 183 | Arg-11 to Val-19, | AR054: 126, AR050: | | |
| | | | | | | Ser-76 to Pro-81, | 115, AR051: 104, | | |
| | | | | | | Thr-121 to Thr-128, | AR089: 13, AR061: 5 | | |
| | | | | | | Gln-163 to Gly-169, | L0439: 5, L0794: 3, | | |
| | | | | | | Glu-179 to Thr-186, | L0758: 3, S6024: 2, | | |
| | | | | | | Lys-191 to Lys-197, | S0010: 2, S0031: 2, | | |
| | | | | | | Ala-202 to Val-207, | S0282: 1, H0497: 1, | | |
| | | | | | | Arg-280 to Phe-291. | H0616: 1, L0807: 1, | | |
| | | | | | | | L0438: 1, H0520: 1, | | |
| | | | | | | | H0539: 1, L0740: 1, | | |
| | | | | | | | L0779: 1, L0777: 1 and | | |
| | | | | | | | L0589: 1. | | |
| | | 951450 | 119 | 1-777 | 230 | Asn-1 to Val-8, | | | |
| | | | | | | Ser-65 to Pro-70, | | | |
| | | | | | | Thr-110 to Thr-117, | | | |
| | | | | | | Gln-152 to Gly-158, | | | |
| | | | | | | Glu-168 to Thr-175, | | | |
| | | | | | | Lys-180 to Gln-190. | | | |
| 63 | HDPSJ02 | 943316 | 73 | 2-766 | 184 | Asp-10 to Ala-15, | AR089: 2, AR061: 2 | | |
| | | | | | | Leu-42 to Phe-52, | H0521: 11, L0751: 6, | | |
| | | | | | | His-110 to Leu-115, | H0445: 4, L0770: 3, | | |
| | | | | | | Gln-141 to Arg-150, | L0775: 3, L0769: 2, | | |
| | | | | | | Phe-168 to Arg-174. | L0764: 2, L0806: 2, | | |
| | | | | | | | L0744: 2, L0748: 2, | | |
| | | | | | | | L0747: 2, L0599: 2, | | |
| | | | | | | | H0638: 1, S0376: 1, | | |
| | | | | | | | S0360: 1, H0619: 1, | | |
| | | | | | | | H0351: 1, H0427: 1, | | |
| | | | | | | | H0575: 1, H0309: 1, | | |
| | | | | | | | T0023: 1, H0181: 1, | | |
| | | | | | | | H0617: 1, S0366: 1, | | |
| | | | | | | | S0142: 1, L0768: 1, | | |
| | | | | | | | S0374: 1, H0690: 1, | | |
| | | | | | | | H0672: 1, H0522: 1, | | |
| | | | | | | | H0555: 1, L0743: 1, | | |
| | | | | | | | L0749: 1, L0777: 1 and | | |
| | | | | | | | L0731: 1. | | |
| 64 | HDTBO48 | 945083 | 74 | 3-491 | 185 | | AR089: 38, AR061: 5 | | |
| | | | | | | | H0486: 2 | | |
| 65 | HE8PB92 | 940805 | 75 | 2-550 | 186 | Lys-55 to Val-67. | AR061: 1, AR089: 1 | | |
| | | | | | | | L0749: 8, L0591: 8, | | |
| | | | | | | | L0770: 7, L0747: 6, | | |
| | | | | | | | L0731: 5, L0439: 4, | | |
| | | | | | | | L0751: 4, L0764: 3, | | |
| | | | | | | | L0794: 3, L0789: 3, | | |
| | | | | | | | L0664: 3, H0547: 3, | | |
| | | | | | | | L0758: 3, H0486: 2, | | |
| | | | | | | | H0013: 2, H0428: 2, | | |
| | | | | | | | L0769: 2, L0659: 2, | | |
| | | | | | | | L0809: 2, L0438: 2, | | |
| | | | | | | | L0748: 2, L0740: 2, | | |
| | | | | | | | L0754: 2, L0757: 2, | | |
| | | | | | | | L0759: 2, L0485: 2, | | |
| | | | | | | | L0581: 2, L0601: 2, | | |
| | | | | | | | H0170: 1, S0040: 1, | | |
| | | | | | | | S6024: 1, S0030: 1, | | |
| | | | | | | | S0222: 1, H0331: 1, | | |
| | | | | | | | L0021: 1, S0010: 1, | | |
| | | | | | | | S0665: 1, H0581: 1, | | |
| | | | | | | | L0471: 1, H0021: 1, | | |
| | | | | | | | H0375: 1, T0023: 1, | | |
| | | | | | | | H0553: 1, H0617: 1, | | |
| | | | | | | | S0386: 1, S0039: 1, | | |
| | | | | | | | S0112: 1, H0625: 1, | | |
| | | | | | | | S0150: 1, L0646: 1, | | |
| | | | | | | | L0662: 1, L0803: 1, | | |
| | | | | | | | L0375; 1, L0666: 1, | | |
| | | | | | | | L0665: 1, L0352: 1, | | |
| | | | | | | | S0126: 1, H0648: 1, | | |
| | | | | | | | H0672: 1, L0750: 1, | | |
| | | | | | | | L0756: 1, L0779: 1, | | |
| | | | | | | | L0777: 1, L0752: 1 and | | |
| | | | | | | | L0755: 1. | | |
| 66 | HEGAR66 | 844291 | 76 | 1-582 | 187 | Pro-65 to Gln-72, | AR061: 25, AR089: 13 | | |
| | | | | | | Ser-103 to Gly-108. | H0550: 1 and H0081: 1. | | |
| 67 | HWAEU35 | 1199101 | 77 | 2-538 | 188 | Arg-22 to Arg-36, | AR051: 268, AR054: | | |
| | | | | | | Asp-83 to Arg-88, | 153, AR050: 68, | | |
| | | | | | | Ser-119 to Lys-126, | AR089: 54, AR061: 9 | | |
| | | | | | | Ala-129 to Gly-139, | H0581: 1 | | |
| | | | | | | Pro-171 to Ser-179. | | | |
| | | 887166 | 120 | 1-474 | 231 | Arg-22 to Arg-36. | | | |
| 68 | HWBCQ57 | 1222194 | 78 | 67-735 | 189 | | AR089: 4, AR061: 4 | | |
| | | | | | | | H0521: 93, H0522: 21, | | |
| | | | | | | | H0580: 17, L0655: 17, | | |
| | | | | | | | H0445: 14, H0638: 13, | | |
| | | | | | | | H0656: 9, S0358: 7, | | |
| | | | | | | | H0090: 7, L0775: 7, | | |
| | | | | | | | L0599: 7, H0657: 6, | | |
| | | | | | | | H0486: 6, H0583: 5, | | |
| | | | | | | | H0125: 5, H0575: 5, | | |
| | | | | | | | H0050: 5, H0264: 5, | | |
| | | | | | | | H0581: 4, H0634: 4, | | |
| | | | | | | | H0561: 4, H0134: 4, | | |
| | | | | | | | L0750: 4, L0777: 4, | | |
| | | | | | | | L0362: 4, S0360: 3, | | |
| | | | | | | | H0637: 3, H0427: 3, | | |
| | | | | | | | H0591: 3, H0648: 3, | | |
| | | | | | | | H0518: 3, L0745: 3, | | |
| | | | | | | | L0731: 3, H0650: 2, | | |
| | | | | | | | S0376: 2, H0586: 2, | | |
| | | | | | | | H0069: 2, H0635: 2, | | |
| | | | | | | | H0318: 2, H0086: 2, | | |
| | | | | | | | H0063: 2, H0488: 2, | | |
| | | | | | | | H0560: 2, H0641: 2, | | |
| | | | | | | | H0646: 2, L0764: 2, | | |
| | | | | | | | L0649: 2, L0774: 2, | | |
| | | | | | | | L0776: 2, L0783: 2, | | |
| | | | | | | | L0664: 2, H0660: 2, | | |
| | | | | | | | L0744: 2, L0748: 2, | | |
| | | | | | | | L0754: 2, L0747: 2, | | |
| | | | | | | | L0749: 2, L0752: 2, | | |
| | | | | | | | L0755: 2, H0556: 1, | | |
| | | | | | | | H0402: 1, S0444: 1, | | |
| | | | | | | | H0676: 1, H0619: 1, | | |
| | | | | | | | H0393: 1, H0549: 1, | | |
| | | | | | | | H0431: 1, H0391: 1, | | |
| | | | | | | | H0592: 1, H0574: 1, | | |
| | | | | | | | H0250: 1, H0042: 1, | | |
| | | | | | | | H0004: 1, H0421: 1, | | |
| | | | | | | | H0150: 1, H0242: 1, | | |
| | | | | | | | H0109: 1, H0252: 1, | | |
| | | | | | | | T0023: 1, T0086: 1, | | |
| | | | | | | | H0031: 1, H0673: 1, | | |
| | | | | | | | H0124: 1, H0376: 1, | | |
| | | | | | | | H0316: 1, H0087: 1, | | |
| | | | | | | | T0067: 1, H0647: 1, | | |
| | | | | | | | S0002: 1, S0426: 1, | | |
| | | | | | | | L0769: 1, L0761: 1, | | |
| | | | | | | | L0372: 1, L0767: 1, | | |
| | | | | | | | L0768: 1, L0805: 1, | | |
| | | | | | | | L0653: 1, L0659: 1, | | |
| | | | | | | | L0782: 1, L0384: 1, | | |
| | | | | | | | L0788: 1, L0666: 1, | | |
| | | | | | | | L0663: 1, H0689: 1, | | |
| | | | | | | | H0682: 1, H0658: 1, | | |
| | | | | | | | H0670: 1, S0328: 1, | | |
| | | | | | | | S0330: 1, H0539: 1, | | |
| | | | | | | | S0146: 1, L0751: 1, | | |
| | | | | | | | L0779: 1, S0260: 1, | | |
| | | | | | | | S0308: 1, L0581: 1, | | |
| | | | | | | | H0677: 1, S0384: 1 and | | |
| | | | | | | | H0506: 1. | | |
| | | 590758 | 121 | 282-578 | 232 | | | | |
| 69 | HEGAO83 | 780837 | 79 | 3-326 | 190 | Lys-1 to Ser-52. | AR089: 9, AR061: 7 | | |
| | | | | | | | H0550: 1 and H0253: 1. | | |

[0040] The first column in Table 1A provides the gene number in the application corresponding to the clone identifier. The second column in Table 1A provides a unique “Clone ID NO:Z” for a cDNA clone related to each contig sequence disclosed in Table 1A. This clone ID references the cDNA clone which contains at least the 5′ most sequence of the assembled contig and at least a portion of SEQ ID NO:X was determined by directly sequencing the referenced clone. The reference clone may have more sequence than described in the sequence listing or the clone may have less. In the vast majority of cases, however, the clone is believed to encode a full-length polypeptide. In the case where a clone is not full-length, a full-length cDNA- can be obtained by methods described elsewhere herein.

[0041] The third column in Table 1A provides a unique “Contig ID” identification for each contig sequence. The fourth column provides the “SEQ ID NO:” identifier for each of the contig polynucleotide sequences disclosed in Table 1A. The fifth column, “ORF (From-To)”, provides the location (i.e., nucleotide position numbers) within the polynucleotide sequence “SEQ ID NO:X” that delineate the preferred open reading frame (ORF) shown in the sequence listing and referenced in Table 1A, column 6, as SEQ ID NO:Y. Where the nucleotide position number “To” is lower than the nucleotide position number “From”, the preferred ORF is the reverse complement of the referenced polynucleotide sequence.

[0042] The sixth column in Table 1A provides the corresponding SEQ ID NO:Y for the polypeptide sequence encoded by the preferred ORF delineated in column 5. In one embodiment, the invention provides an amino acid sequence comprising, or alternatively consisting of, a polypeptide encoded by the portion of SEQ ID NO:X delineated by “ORF (From-To)”. Also provided are polynucleotides encoding such amino acid sequences and the complementary strand thereto.

[0043] Column 7 in Table 1A lists residues comprising epitopes contained in the polypeptides encoded by the preferred ORF (SEQ ID NO:Y), as predicted using the algorithm of Jameson and Wolf, (1988) Comp. Appl. Biosci. 4:181-186. The Jameson-Wolf antigenic analysis was performed using the computer program PROTEAN (Version 3.11 for the Power Maclntosh, DNASTAR, Inc., 1228 South Park Street Madison, Wis.). In specific embodiments, polypeptides of the invention comprise, or alternatively consist of, at least one, two, three, four, five or more of the predicted epitopes as described in Table 1A. It will be appreciated that depending on the analytical criteria used to predict antigenic determinants, the exact address of the determinant may vary slightly.

[0044] Column 8 in Table 1A provides an expression profile and library code: count for each of the contig sequences (SEQ ID NO:X) disclosed in Table 1A, which can routinely be combined with the information provided in Table 4 and used to determine the tissues, cells, and/or cell line libraries which predominantly express the polynucleotides of the invention. The first number in column 8 (preceding the colon), represents the tissue/cell source identifier code corresponding to the code and description provided in Table 4. For those identifier codes in which the first two letters are not “AR”, the second number in column 8 (following the colon) represents the number of times a sequence corresponding to the reference polynucleotide sequence was identified in the tissue/cell source. Those tissue/cell source identifier codes in which the first two letters are “AR” designate information generated using DNA array technology. Utilizing this technology, cDNAs were amplified by PCR and then transferred, in duplicate, onto the array. Gene expression was assayed through hybridization of first strand cDNA probes to the DNA array. cDNA probes were generated from total RNA extracted from a variety of different tissues and cell lines. Probe synthesis was performed in the presence of ³³P dCTP, using oligo(dT) to prime reverse transcription. After hybridization, high stringency washing conditions were employed to remove non-specific hybrids from the array. The remaining signal, emanating from each gene target, was measured using a Phosphorimager. Gene expression was reported as Phosphor Stimulating Luminescence (PSL) which reflects the level of phosphor signal generated from the probe hybridized to each of the gene targets represented on the array. A local background signal subtraction was performed before the total signal generated from each array was used to normalize gene expression between the different hybridizations. The value presented after “[array code]:” represents the mean of the duplicate values, following background subtraction and probe normalization. One of skill in the art could routinely use this information to identify normal and/or diseased tissue(s) which show a predominant expression pattern of the corresponding polynucleotide of the invention or to identify polynucleotides which show predominant and/or specific tissue and/or cell expression.

[0045] Column 9 in Table 1A provides a chromosomal map location for certain polynucleotides of the invention. Chromosomal location was determined by finding exact matches to EST and cDNA sequences contained in the NCBI (National Center for Biotechnology Information) UniGene database. Each sequence in the UniGene database is assigned to a “cluster”, all of the ESTs, cDNAs, and STSs in a cluster are believed to be derived from a single gene. Chromosomal mapping data is often available for one or more sequence(s) in a UniGene cluster; this data (if consistent) is then applied to the cluster as a whole. Thus, it is possible to infer the chromosomal location of a new polynucleotide sequence by determining its identity with a mapped UniGene cluster.

[0046] A modified version of the computer program BLASTN (Altshul et al., J. Mol. Biol. 215:403-410 (1990); and Gish and States, Nat. Genet. 3:266-272 (1993)) was used to search the UniGene database for EST or cDNA sequences that contain exact or near-exact matches to a polynucleotide sequence of the invention (the ‘Query’). A sequence from the UniGene database (the ‘Subject’) was said to be an exact match if it contained a segment of 50 nucleotides in length such that 48 of those nucleotides were in the same order as found in the Query sequence. If all of the matches that met this criteria were in the same UniGene cluster, and mapping data was available for this cluster, it is indicated in Table 1A under the heading “Cytologic Band”. Where a cluster had been further localized to a distinct cytologic band, that band is disclosed; where no banding information was available, but the gene had been localized to a single chromosome, the chromosome is disclosed.

[0047] Once a presumptive chromosomal location was determined for a polynucleotide of the invention, an associated disease locus was identified by comparison with a database of diseases which have been experimentally associated with genetic loci. The database used was the Morbid Map, derived from OMIM™ (supra). If the putative chromosomal location of a polynucleotide of the invention (Query sequence) was associated with a disease in the Morbid Map database, an OMIM reference identification number was noted in column 10, Table 1A, labelled “OMIM Disease Reference(s)”. Table 5 is a key to the OMIM reference identification numbers (column 1), and provides a description of the associated disease in Column 2.

TABLE 1B

| Clone ID | SEQ ID | CONTIG | BAC | SEQ ID | EXON |
|---|---|---|---|---|---|
| NO: Z | NO: X | ID: | ID: A | NO: B | From-To |
| HDPTW90 | 12 | 722699 | AL109911 | 240 | 1-744 |
| HDPTW90 | 12 | 722699 | AC017113 | 241 | 1-251 |
| HDPTW90 | 12 | 722699 | AL109804 | 242 | 1-86 |
| | | | | | 393-695 |
| | | | | | 2345-2611 |
| | | | | | 2985-3904 |
| | | | | | 4603-5446 |
| | | | | | 5467-5608 |
| | | | | | 6481-6582 |
| | | | | | 6976-7234 |
| | | | | | 7899-8638 |
| | | | | | 9094-9354 |
| | | | | | 9548-10236 |
| HDPTW90 | 12 | 722699 | AL109804 | 243 | 1-161 |
| | | | | | 684-1524 |
| | | | | | 1611-1868 |
| | | | | | 2185-2484 |
| | | | | | 2550-3044 |
| | | | | | 3158-3539 |
| | | | | | 4120-4422 |
| | | | | | 4682-4784 |
| | | | | | 5155-5227 |
| | | | | | 5763-7414 |
| HDPTW90 | 12 | 722699 | AL109804 | 244 | 1-390 |
| HWLHY05 | 34 | 901894 | AC024065 | 245 | 1-46 |
| | | | | | 584-749 |
| | | | | | 2172-2327 |
| | | | | | 4516-4796 |
| | | | | | 8939-9232 |
| | | | | | 15124-15645 |
| | | | | | 16539-16570 |
| | | | | | 17608-17712 |
| | | | | | 18097-18247 |
| | | | | | 18689-19315 |
| HHFME38 | 35 | 947970 | AC011307 | 246 | 1-738 |
| | | | | | 777-928 |
| | | | | | 6547-8986 |
| | | | | | 9041-9656 |
| HHFME38 | 35 | 947970 | AC011302 | 247 | 1-602 |
| HHFME38 | 35 | 947970 | AC004616 | 248 | 1-890 |
| | | | | | 1656-2025 |
| | | | | | 6359-9765 |
| HHFME38 | 35 | 947970 | AC011307 | 249 | 1-5863 |
| | | | | | 8965-9695 |
| | | | | | 9824-11213 |
| | | | | | 11438-11774 |
| | | | | | 12992-13348 |
| | | | | | 14833-14982 |
| | | | | | 18797-19148 |
| | | | | | 19635-20733 |
| | | | | | 20793-23092 |
| | | | | | 23268-23517 |
| | | | | | 23704-25018 |
| | | | | | 25022-25395 |
| HHFME38 | 35 | 947970 | AC011302 | 250 | 1-167 |
| | | | | | 5786-8225 |
| | | | | | 8280-8895 |
| HNECM88 | 40 | 974717 | AC018755 | 251 | 1-101 |
| | | | | | 184-573 |
| | | | | | 762-1043 |
| | | | | | 1295-1345 |
| | | | | | 2786-3322 |
| | | | | | 3425-3641 |
| | | | | | 3870-4696 |
| HNECM88 | 40 | 974717 | AC018755 | 252 | 1-387 |
| HNECM88 | 40 | 974717 | AC018755 | 253 | 1-310 |
| HHFCI36 | 48 | 844285 | AC073582 | 254 | 1-348 |
| HHFCI36 | 48 | 844285 | AC011307 | 255 | 1-738 |
| | | | | | 777-928 |
| | | | | | 6547-8986 |
| | | | | | 9041-9656 |
| HHFCI36 | 48 | 844285 | AC011302 | 256 | 1-167 |
| | | | | | 5786-8225 |
| | | | | | 8280-8895 |
| HHFCI36 | 48 | 844285 | AC004616 | 257 | 1-890 |
| | | | | | 1656-2025 |
| | | | | | 6359-9765 |
| HHFCI36 | 48 | 844285 | AC073582 | 258 | 1-1884 |
| HHFCI36 | 48 | 844285 | AC011307 | 259 | 1-5863 |
| | | | | | 8965-9695 |
| | | | | | 9824-11213 |
| | | | | | 11438-11774 |
| | | | | | 12992-13348 |
| | | | | | 14833-14982 |
| | | | | | 18797-19148 |
| | | | | | 19635-20733 |
| | | | | | 20793-23092 |
| | | | | | 23268-23517 |
| | | | | | 23704-25018 |
| | | | | | 25022-25395 |
| HHFCI36 | 48 | 844285 | AC011302 | 260 | 1-602 |
| HHFCI36 | 48 | 844285 | AC011302 | 261 | 1-5861 |
| | | | | | 8963-9683 |
| | | | | | 9822-11211 |
| | | | | | 11436-11772 |
| | | | | | 12990-13346 |
| | | | | | 14831-14980 |
| | | | | | 18796-19146 |
| | | | | | 19633-20731 |
| | | | | | 20802-23090 |
| | | | | | 23266-23515 |
| | | | | | 23772-25006 |
| | | | | | 25020-25393 |
| HLDBL95 | 51 | 811269 | AL133215 | 262 | 1-187 |
| | | | | | 316-492 |
| | | | | | 663-724 |
| | | | | | 870-1310 |
| | | | | | 2217-2658 |
| | | | | | 2795-3946 |
| | | | | | 3989-5369 |
| | | | | | 5762-6797 |
| | | | | | 6802-6998 |
| HLDBL95 | 51 | 811269 | AL133215 | 263 | 1-747 |
| | | | | | 955-1885 |
| | | | | | 2072-2316 |
| | | | | | 2864-3486 |
| | | | | | 4259-4395 |
| | | | | | 4625-4789 |
| | | | | | 5237-6834 |
| HLDBL95 | 51 | 811269 | AL133215 | 264 | 1-125 |
| | | | | | 255-336 |
| HLHDR39 | 53 | 523499 | AL354760 | 265 | 1-504 |
| HLHDR39 | 53 | 523499 | AL354760 | 266 | 1-528 |
| HLHDR39 | 53 | 523499 | AL354760 | 267 | 1-1210 |
| HLWFG82 | 59 | 929647 | AC024009 | 268 | 1-1072 |
| | | | | | 1285-1807 |
| | | | | | 2970-3240 |
| | | | | | 3323-3578 |
| | | | | | 3718-4021 |
| | | | | | 4167-4681 |
| | | | | | 4900-4999 |
| | | | | | 5291-5493 |
| | | | | | 5601-6055 |
| | | | | | 7662-8405 |
| | | | | | 8579-8892 |
| | | | | | 9250-9591 |
| HLWFG82 | 59 | 929647 | AC040991 | 269 | 1-1072 |
| | | | | | 1285-1807 |
| | | | | | 2969-3239 |
| | | | | | 3322-3578 |
| | | | | | 3718-4021 |
| | | | | | 4166-4680 |
| | | | | | 5290-5492 |
| | | | | | 5600-6054 |
| | | | | | 7661-8403 |
| | | | | | 8577-8890 |
| | | | | | 9248-9589 |
| | | | | | 11692-12415 |
| HLWFG82 | 59 | 929647 | AC009955 | 270 | 1-1072 |
| | | | | | 1285-1807 |
| | | | | | 2969-3239 |
| | | | | | 3322-3578 |
| | | | | | 3718-4021 |
| | | | | | 4166-4680 |
| | | | | | 4899-4998 |
| | | | | | 5290-5492 |
| | | | | | 5600-6054 |
| | | | | | 7661-8404 |
| | | | | | 8578-8891 |
| | | | | | 9249-9590 |
| | | | | | 11693-12416 |
| | | | | | 12628-13109 |
| | | | | | 13182-13470 |
| | | | | | 13675-13945 |
| | | | | | 14072-16144 |
| | | | | | 16553-16761 |
| | | | | | 18342-18428 |
| | | | | | 18598-18758 |
| | | | | | 19030-19180 |
| | | | | | 19452-19907 |
| | | | | | 20007-20565 |
| HLWFG82 | 59 | 929647 | AC040991 | 271 | 1-1023 |
| | | | | | 1743-2217 |
| | | | | | 2502-2917 |
| | | | | | 3075-3422 |
| HLWFG82 | 59 | 929647 | AC009955 | 272 | 1-604 |
| | | | | | 2136-3385 |
| | | | | | 3537-4031 |
| | | | | | 5661-5910 |
| | | | | | 6207-7370 |
| | | | | | 8204-9136 |
| | | | | | 9469-9651 |
| | | | | | 9951-11649 |
| HLWFG82 | 59 | 929647 | AC009955 | 273 | 1-1023 |
| | | | | | 1743-2217 |
| | | | | | 2502-2917 |
| | | | | | 3075-3422 |
| HHAUD86 | 62 | 944835 | AL139287 | 274 | 1-413 |
| | | | | | 495-1159 |
| | | | | | 1314-1488 |
| | | | | | 1607-1647 |
| | | | | | 1734-1811 |
| | | | | | 1893-3152 |
| HHAUD86 | 62 | 944835 | AL139287 | 275 | 1-308 |
| HBZSH19 | 68 | 578224 | AC073321 | 276 | 1-1051 |
| | | | | | 1108-3112 |
| | | | | | 3229-3952 |
| HBZSH19 | 68 | 578224 | AC073321 | 277 | 1-246 |
| | | | | | 397-712 |
| | | | | | 1020-1150 |
| HBZSH19 | 68 | 578224 | AC073321 | 278 | 1-450 |
| HCEMK49 | 70 | 948028 | AL365181 | 279 | 1-68 |
| | | | | | 526-818 |
| | | | | | 3413-3643 |
| | | | | | 4202-5430 |
| HDPSJ02 | 73 | 943316 | AL109804 | 280 | 1-161 |
| | | | | | 684-1524 |
| | | | | | 1611-1868 |
| | | | | | 2185-2484 |
| | | | | | 2550-3044 |
| | | | | | 3158-3539 |
| | | | | | 4120-4422 |
| | | | | | 4682-4784 |
| | | | | | 5155-5227 |
| | | | | | 5763-7414 |
| HDPSJ02 | 73 | 943316 | AL109804 | 281 | 1-442 |
| HDPSJ02 | 73 | 943316 | AL109804 | 282 | 1-86 |
| | | | | | 393-695 |
| | | | | | 2345-2611 |
| | | | | | 2985-3904 |
| | | | | | 4603-5446 |
| | | | | | 5467-5608 |
| | | | | | 6481-6582 |
| | | | | | 6976-7234 |
| | | | | | 7899-8638 |
| | | | | | 9094-9354 |
| | | | | | 9548-10236 |
| HE8PB92 | 75 | 940805 | AC021942 | 283 | 1-72 |
| | | | | | 2379-2539 |
| | | | | | 4648-4862 |
| | | | | | 7079-7594 |
| | | | | | 9089-9253 |
| | | | | | 10868-11071 |
| | | | | | 12045-12194 |
| HE8PB92 | 75 | 940805 | AP002414 | 284 | 1-994 |
| HE8PB92 | 75 | 940805 | AC021942 | 285 | 1-445 |
| HEGAO83 | 79 | 780837 | AC024009 | 286 | 1-880 |
| | | | | | 1967-2289 |
| | | | | | 2746-2890 |
| | | | | | 3236-3284 |
| HEGAO83 | 79 | 780837 | AC040991 | 287 | 1-880 |
| | | | | | 1967-2288 |
| | | | | | 2745-2889 |
| | | | | | 3235-3283 |
| HEGAO83 | 79 | 780837 | AC040991 | 288 | 1-176 |

[0048] Table 1B summarizes additional polynucleotides encompassed by the invention (including cDNA clones related to the sequences (Clone ID NO:Z), contig sequences (contig identifier (Contig ID:) contig nucleotide sequence identifiers (SEQ ID NO:X)), and genomic sequences (SEQ ID NO:B). The first column provides a unique clone identifier, “Clone ID NO:Z”, for a cDNA clone related to each contig sequence. The second column provides the sequence identifier, “SEQ ID NO:X”, for each contig sequence. The third column provides a unique contig identifier, “Contig ID:” for each contig sequence. The fourth column, provides a BAC identifier “BAC ID NO:A” for the BAC clone referenced in the corresponding row of the table. The fifth column provides the nucleotide sequence identifier, “SEQ ID NO:B” for a fragment of the BAC clone identified in column four of the corresponding row of the table. The sixth column, “Exon From-To”, provides the location (i.e.;, nucleotide position numbers) within the polynucleotide sequence of SEQ ID NO:B which delineate certain polynucleotides of the invention that are also exemplary members of polynucleotide sequences that encode polypeptides of the invention (e.g., polypeptides containing amino acid sequences encoded by the polynucleotide sequences delineated in column six, and fragments and variants thereof).

TABLE 2

| Clone ID | | SEQ ID | Analysis | | PFam/NR Accession | Score/Percent | | |
|---|---|---|---|---|---|---|---|---|
| NO: Z | Contig ID: | NO: X | Method | PFam/NR Description | Number | Identity | NT From | NT To |
| HAHDI40 | 710790 | 11 | HMMER | PFAM: IG | PF00047 | 12.66 | 522 | 593 |
| | | | 1.8 | (immunoglobulin) | | | | |
| | | | | superfamily | | | | |
| | | | blastx.2 | M-protein [Gallus gallus] | dbj\|BAA02033.1\| | 47% | 204 | 653 |
| | | | | | | 48% | 2 | 199 |
| | | | | | | 33% | 8 | 106 |
| HDPTW90 | 722699 | 12 | HMMER | PFAM: IG | PF00047 | 3.32 | 1 | 24 |
| | | | 1.8 | (immunoglobulin) | | | | |
| | | | | superfamily | | | | |
| HDPXL24 | 1227222 | 13 | blastx.14 | sialoadhesin - mouse | pir\|S50065\|S50065 | 76% | 462 | 1166 |
| | | | | | | 75% | 1242 | 1772 |
| | | | | | | 67% | 13 | 462 |
| | | | | | | 31% | 1317 | 1769 |
| | | | | | | 34% | 1326 | 1772 |
| | | | | | | 39% | 780 | 1079 |
| | | | | | | 30% | 729 | 1154 |
| | | | | | | 32% | 780 | 1154 |
| | | | | | | 38% | 1341 | 1634 |
| | | | | | | 44% | 19 | 228 |
| | | | | | | 32% | 4 | 315 |
| | | | | | | 40% | 558 | 773 |
| | | | | | | 35% | 564 | 800 |
| | | | | | | 44% | 909 | 1076 |
| | | | | | | 37% | 37 | 228 |
| | | | | | | 40% | 1470 | 1652 |
| | | | | | | 25% | 522 | 749 |
| | | | | | | 44% | 1659 | 1772 |
| | | | | | | 30% | 879 | 1073 |
| | | | | | | 47% | 774 | 887 |
| | | | | | | 45% | 1647 | 1772 |
| | | | | | | 39% | 1164 | 1301 |
| | | | | | | 39% | 1461 | 1634 |
| | | | | | | 36% | 1155 | 1301 |
| | | | | | | 36% | 1155 | 1325 |
| | | | | | | 31% | 774 | 944 |
| | | | | | | 34% | 1335 | 1472 |
| | | | | | | 45% | 31 | 129 |
| | | | | | | 57% | 996 | 1073 |
| | | | | | | 50% | 1683 | 1772 |
| | | | | | | 57% | 474 | 551 |
| | | | | | | 40% | 555 | 695 |
| | | | | | | 31% | 1602 | 1772 |
| | | | | | | 69% | 1167 | 1235 |
| | | | | | | 42% | 196 | 315 |
| | | | | | | 51% | 465 | 551 |
| | | | | | | 42% | 16 | 129 |
| | | | | | | 53% | 1545 | 1640 |
| | | | | | | 33% | 172 | 315 |
| | | | | | | 30% | 1164 | 1301 |
| | | | | | | 39% | 567 | 665 |
| | | | | | | 35% | 468 | 593 |
| | | | | | | 59% | 1763 | 1828 |
| | | | | | | 37% | 187 | 282 |
| | | | | | | 44% | 861 | 941 |
| | | | | | | 34% | 304 | 453 |
| | | | | | | 41% | 468 | 554 |
| | | | | | | 57% | 1155 | 1211 |
| | | | | | | 48% | 382 | 456 |
| | | | | | | 33% | 483 | 599 |
| | | | | | | 45% | 1452 | 1517 |
| | | | | | | 50% | 382 | 453 |
| | | | | | | 34% | 570 | 683 |
| | | | | | | 39% | 61 | 129 |
| | | | | | | 41% | 385 | 456 |
| | | | | | | 26% | 1314 | 1439 |
| | | | | | | 42% | 388 | 465 |
| | | | | | | 33% | 687 | 776 |
| | | | | | | 48% | 1173 | 1247 |
| | | | | | | 39% | 166 | 234 |
| | | | | | | 30% | 807 | 932 |
| | | | | | | 38% | 388 | 465 |
| | | | | | | 37% | 1422 | 1493 |
| | | | | | | 50% | 88 | 129 |
| | | | | | | 47% | 1107 | 1169 |
| | | | | | | 36% | 609 | 665 |
| | | | | | | 36% | 1110 | 1166 |
| | | | | | | 63% | 3243 | 3275 |
| | | | | | | 36% | 609 | 665 |
| | | | | | | 38% | 1425 | 1487 |
| | | | | | | 60% | 780 | 809 |
| | | | | | | 45% | 545 | 604 |
| | | | | | | 50% | 208 | 261 |
| | | | | | | 37% | 864 | 911 |
| | | | | | | 46% | 606 | 644 |
| | | | | | | 36% | 855 | 911 |
| | | | | | | 44% | 1422 | 1475 |
| | | | | | | 39% | 1615 | 1683 |
| HDPXL24 | 846775 | 80 | HMMER | PFAM: Immunoglobulin | PF00047 | 30.8 | 204 | 350 |
| | | | 2.1.1 | domain | | | | |
| | | | blastx | sialoadhesin [Mus | emb\|CAA85268.1\| | 67% | 15 | 422 |
| | | | | musculus] | | 52% | 18 | 227 |
| | | | | | | 36% | 3 | 314 |
| | | | | | | 40% | 36 | 227 |
| | | | | | | 37% | 15 | 176 |
| | | | | | | 42% | 195 | 314 |
| | | | | | | 82% | 410 | 460 |
| | | | | | | 33% | 171 | 278 |
| | | | | | | 35% | 60 | 143 |
| | | | | | | 83% | 468 | 503 |
| | | | | | | 42% | 87 | 143 |
| | | | | | | 50% | 207 | 260 |
| | | | | | | 47% | 207 | 257 |
| HDTBW62 | 681324 | 14 | HMMER | PFAM: IG | PF00047 | 4.25 | 78 | 155 |
| | | | 1.8 | (immunoglobulin) | | | | |
| | | | | superfamily | | | | |
| HE2KL28 | 1124892 | 15 | blastx.14 | UNC-89 [Caenorhabditis | gi\|1160355\|gb\|AAB0 | 31% | 565 | 293 |
| | | | | elegans] | 0542.1\| | 35% | 967 | 716 |
| | | | | | | 30% | 964 | 716 |
| | | | | | | 30% | 964 | 719 |
| | | | | | | 30% | 967 | 692 |
| | | | | | | 28% | 964 | 716 |
| | | | | | | 32% | 958 | 716 |
| | | | | | | 32% | 967 | 716 |
| | | | | | | 30% | 937 | 701 |
| | | | | | | 31% | 964 | 704 |
| | | | | | | 30% | 973 | 722 |
| | | | | | | 31% | 973 | 716 |
| | | | | | | 37% | 562 | 410 |
| | | | | | | 35% | 466 | 290 |
| | | | | | | 28% | 574 | 293 |
| | | | | | | 43% | 565 | 449 |
| | | | | | | 27% | 562 | 293 |
| | | | | | | 28% | 562 | 323 |
| | | | | | | 26% | 565 | 299 |
| | | | | | | 36% | 568 | 437 |
| | | | | | | 27% | 970 | 818 |
| | | | | | | 37% | 565 | 437 |
| | | | | | | 28% | 562 | 323 |
| | | | | | | 40% | 565 | 440 |
| | | | | | | 36% | 967 | 854 |
| | | | | | | 30% | 970 | 794 |
| | | | | | | 33% | 844 | 686 |
| | | | | | | 24% | 964 | 692 |
| | | | | | | 23% | 574 | 293 |
| | | | | | | 25% | 559 | 305 |
| | | | | | | 42% | 562 | 449 |
| | | | | | | 48% | 415 | 317 |
| | | | | | | 26% | 550 | 290 |
| | | | | | | 32% | 562 | 416 |
| | | | | | | 43% | 403 | 293 |
| | | | | | | 30% | 448 | 293 |
| | | | | | | 30% | 562 | 446 |
| | | | | | | 46% | 811 | 716 |
| | | | | | | 39% | 430 | 293 |
| | | | | | | 28% | 877 | 668 |
| | | | | | | 27% | 883 | 626 |
| | | | | | | 40% | 445 | 305 |
| | | | | | | 38% | 562 | 437 |
| | | | | | | 25% | 964 | 731 |
| | | | | | | 33% | 565 | 440 |
| | | | | | | 29% | 562 | 440 |
| | | | | | | 33% | 964 | 830 |
| | | | | | | 32% | 964 | 827 |
| | | | | | | 32% | 565 | 446 |
| | | | | | | 35% | 556 | 437 |
| | | | | | | 35% | 418 | 293 |
| | | | | | | 34% | 571 | 434 |
| | | | | | | 32% | 838 | 692 |
| | | | | | | 35% | 562 | 437 |
| | | | | | | 24% | 562 | 317 |
| | | | | | | 24% | 964 | 806 |
| | | | | | | 36% | 562 | 449 |
| | | | | | | 35% | 418 | 293 |
| | | | | | | 35% | 418 | 293 |
| | | | | | | 36% | 421 | 290 |
| | | | | | | 40% | 403 | 293 |
| | | | | | | 39% | 415 | 293 |
| | | | | | | 30% | 967 | 830 |
| | | | | | | 40% | 430 | 311 |
| | | | | | | 30% | 871 | 692 |
| | | | | | | 23% | 892 | 665 |
| | | | | | | 40% | 430 | 290 |
| | | | | | | 34% | 994 | 854 |
| | | | | | | 36% | 562 | 449 |
| | | | | | | 27% | 511 | 281 |
| | | | | | | 24% | 1024 | 863 |
| | | | | | | 40% | 964 | 860 |
| | | | | | | 34% | 565 | 452 |
| | | | | | | 43% | 808 | 719 |
| | | | | | | 29% | 445 | 293 |
| | | | | | | 34% | 430 | 293 |
| | | | | | | 31% | 409 | 278 |
| | | | | | | 31% | 466 | 293 |
| | | | | | | 43% | 811 | 716 |
| | | | | | | 36% | 967 | 860 |
| | | | | | | 22% | 553 | 323 |
| | | | | | | 35% | 964 | 863 |
| | | | | | | 38% | 970 | 839 |
| | | | | | | 31% | 565 | 452 |
| | | | | | | 38% | 430 | 323 |
| | | | | | | 35% | 406 | 290 |
| | | | | | | 35% | 994 | 875 |
| | | | | | | 47% | 931 | 863 |
| | | | | | | 37% | 964 | 860 |
| | | | | | | 30% | 430 | 311 |
| | | | | | | 30% | 979 | 860 |
| | | | | | | 35% | 817 | 716 |
| | | | | | | 34% | 571 | 449 |
| | | | | | | 37% | 562 | 458 |
| | | | | | | 37% | 802 | 692 |
| | | | | | | 26% | 871 | 746 |
| | | | | | | 25% | 562 | 431 |
| | | | | | | 28% | 562 | 446 |
| | | | | | | 54% | 370 | 305 |
| | | | | | | 43% | 802 | 713 |
| | | | | | | 22% | 967 | 797 |
| | | | | | | 33% | 391 | 275 |
| | | | | | | 28% | 616 | 407 |
| | | | | | | 35% | 802 | 692 |
| | | | | | | 34% | 817 | 704 |
| | | | | | | 34% | 391 | 296 |
| | | | | | | 26% | 997 | 860 |
| | | | | | | 31% | 562 | 449 |
| | | | | | | 31% | 817 | 722 |
| | | | | | | 43% | 418 | 323 |
| | | | | | | 33% | 790 | 683 |
| | | | | | | 42% | 391 | 314 |
| | | | | | | 30% | 565 | 446 |
| | | | | | | 30% | 391 | 293 |
| | | | | | | 29% | 562 | 461 |
| | | | | | | 30% | 817 | 692 |
| | | | | | | 32% | 418 | 317 |
| | | | | | | 30% | 895 | 776 |
| | | | | | | 28% | 964 | 860 |
| | | | | | | 31% | 964 | 860 |
| | | | | | | 35% | 520 | 437 |
| | | | | | | 31% | 841 | 719 |
| | | | | | | 37% | 964 | 893 |
| | | | | | | 30% | 874 | 746 |
| | | | | | | 61% | 472 | 434 |
| | | | | | | 28% | 982 | 887 |
| | | | | | | 28% | 817 | 692 |
| | | | | | | 41% | 364 | 293 |
| | | | | | | 47% | 361 | 293 |
| | | | | | | 54% | 481 | 449 |
| | | | | | | 32% | 808 | 698 |
| | | | | | | 50% | 487 | 440 |
| | | | | | | 32% | 871 | 797 |
| | | | | | | 66% | 883 | 857 |
| | | | | | | 30% | 892 | 833 |
| | | | | | | 32% | 745 | 671 |
| | | | | | | 20% | 874 | 716 |
| | | | | | | 58% | 481 | 446 |
| | | | | | | 27% | 427 | 299 |
| | | | | | | 58% | 481 | 446 |
| | | | | | | 47% | 213 | 151 |
| | | | | | | 30% | 796 | 719 |
| | | | | | | 23% | 430 | 290 |
| | | | | | | 66% | 883 | 857 |
| | | | | | | 21% | 463 | 311 |
| | | | | | | 38% | 475 | 437 |
| HE2KL28 | 872201 | 81 | HMMER | PFAM: IG | PF00047 | 23.05 | 133 | 318 |
| | | | 1.8 | (immunoglobulin) | | | | |
| | | | | superfamily | | | | |
| | | | blastx | smooth muscle myosin | gb\|AAA49069.1\| | 36% | 91 | 321 |
| | | | | light chain kinase | | | | |
| | | | | precursor (EC 2.7.2.37) | | | | |
| | | | | [Gallus gallus] | | | | |
| HE8BQ58 | 954449 | 82 | HMMER | PFAM: IG | PF00047 | 4.19 | 90 | 158 |
| | | | 1.8 | (immunoglobulin) | | | | |
| | | | | superfamily | | | | |
| HHATR09 | 1129468 | 17 | blastx.2 | hypothetical protein | pir\|T20992\|T20992 | 37% | 153 | 953 |
| | | | | F15G9.4a - | | 36% | 147 | 953 |
| | | | | Caenorhabditis elegans | | 34% | 159 | 953 |
| | | | | | | 33% | 159 | 953 |
| | | | | | | 31% | 147 | 953 |
| | | | | | | 31% | 156 | 953 |
| | | | | | | 30% | 147 | 956 |
| | | | | | | 32% | 159 | 953 |
| | | | | | | 31% | 165 | 947 |
| | | | | | | 30% | 153 | 944 |
| | | | | | | 29% | 159 | 944 |
| | | | | | | 32% | 159 | 944 |
| | | | | | | 29% | 201 | 953 |
| | | | | | | 31% | 159 | 953 |
| | | | | | | 32% | 159 | 944 |
| | | | | | | 27% | 150 | 953 |
| | | | | | | 31% | 165 | 956 |
| | | | | | | 28% | 153 | 953 |
| | | | | | | 28% | 150 | 944 |
| | | | | | | 31% | 165 | 953 |
| | | | | | | 30% | 150 | 944 |
| | | | | | | 28% | 150 | 953 |
| | | | | | | 33% | 273 | 947 |
| | | | | | | 27% | 147 | 953 |
| | | | | | | 30% | 165 | 944 |
| | | | | | | 34% | 147 | 674 |
| | | | | | | 33% | 153 | 707 |
| | | | | | | 26% | 150 | 953 |
| | | | | | | 27% | 162 | 953 |
| | | | | | | 26% | 147 | 950 |
| | | | | | | 28% | 147 | 944 |
| | | | | | | 28% | 204 | 914 |
| | | | | | | 25% | 126 | 953 |
| | | | | | | 34% | 159 | 638 |
| | | | | | | 26% | 159 | 953 |
| | | | | | | 25% | 147 | 953 |
| | | | | | | 30% | 402 | 944 |
| | | | | | | 23% | 162 | 953 |
| | | | | | | 28% | 159 | 914 |
| | | | | | | 30% | 411 | 908 |
| | | | | | | 37% | 150 | 350 |
| HHATR09 | 971330 | 83 | HMMER | PFAM: Immunoglobulin | PF00047 | 101.2 | 150 | 332 |
| | | | 2.1.1 | domain | | | | |
| | | | blastx | predicted protein contains | emb\|CAA87335.1\| | 29% | 201 | 539 |
| | | | | a large number of Ig | | 31% | 537 | 803 |
| | | | | superfamily 1 1 gene; | | 36% | 252 | 515 |
| | | | | cDNA EST yk248d7.3 | | 32% | 276 | 527 |
| | | | | comes from this gene; c | | 38% | 738 | 953 |
| | | | | | | 33% | 270 | 521 |
| | | | | | | 30% | 270 | 554 |
| | | | | | | 31% | 738 | 944 |
| | | | | | | 22% | 147 | 515 |
| | | | | | | 33% | 738 | 953 |
| | | | | | | 25% | 693 | 944 |
| | | | | | | 46% | 525 | 680 |
| | | | | | | 29% | 255 | 506 |
| | | | | | | 42% | 531 | 707 |
| | | | | | | 29% | 717 | 953 |
| | | | | | | 26% | 237 | 515 |
| | | | | | | 40% | 537 | 677 |
| | | | | | | 38% | 252 | 398 |
| | | | | | | 31% | 729 | 968 |
| | | | | | | 27% | 486 | 704 |
| | | | | | | 33% | 555 | 758 |
| | | | | | | 40% | 240 | 389 |
| | | | | | | 25% | 258 | 530 |
| | | | | | | 31% | 738 | 944 |
| | | | | | | 39% | 252 | 395 |
| | | | | | | 32% | 729 | 953 |
| | | | | | | 31% | 756 | 944 |
| | | | | | | 50% | 159 | 254 |
| | | | | | | 40% | 270 | 401 |
| | | | | | | 25% | 417 | 674 |
| | | | | | | 24% | 717 | 950 |
| | | | | | | 36% | 525 | 674 |
| | | | | | | 41% | 543 | 680 |
| | | | | | | 42% | 531 | 680 |
| | | | | | | 39% | 252 | 395 |
| | | | | | | 32% | 771 | 944 |
| | | | | | | 44% | 552 | 680 |
| | | | | | | 56% | 153 | 242 |
| | | | | | | 35% | 528 | 680 |
| | | | | | | 36% | 534 | 674 |
| | | | | | | 39% | 537 | 680 |
| | | | | | | 28% | 846 | 1070 |
| | | | | | | 30% | 525 | 713 |
| | | | | | | 32% | 231 | 398 |
| | | | | | | 37% | 270 | 398 |
| | | | | | | 35% | 528 | 680 |
| | | | | | | 38% | 540 | 680 |
| | | | | | | 34% | 534 | 689 |
| | | | | | | 32% | 804 | 980 |
| | | | | | | 38% | 525 | 680 |
| | | | | | | 27% | 309 | 512 |
| | | | | | | 41% | 414 | 515 |
| | | | | | | 34% | 264 | 401 |
| | | | | | | 42% | 564 | 677 |
| | | | | | | 30% | 693 | 848 |
| | | | | | | 41% | 411 | 533 |
| | | | | | | 35% | 273 | 407 |
| | | | | | | 34% | 267 | 404 |
| | | | | | | 40% | 540 | 674 |
| | | | | | | 33% | 147 | 254 |
| | | | | | | 42% | 402 | 515 |
| | | | | | | 35% | 513 | 683 |
| | | | | | | 43% | 564 | 680 |
| | | | | | | 41% | 552 | 680 |
| | | | | | | 36% | 561 | 698 |
| | | | | | | 37% | 540 | 668 |
| | | | | | | 37% | 819 | 953 |
| | | | | | | 44% | 159 | 239 |
| | | | | | | 30% | 270 | 395 |
| | | | | | | 27% | 279 | 431 |
| | | | | | | 45% | 729 | 821 |
| | | | | | | 31% | 711 | 833 |
| | | | | | | 37% | 147 | 281 |
| | | | | | | 32% | 234 | 389 |
| | | | | | | 24% | 696 | 944 |
| | | | | | | 25% | 273 | 425 |
| | | | | | | 23% | 693 | 845 |
| | | | | | | 21% | 126 | 389 |
| | | | | | | 36% | 423 | 512 |
| | | | | | | 46% | 432 | 515 |
| | | | | | | 34% | 531 | 680 |
| | | | | | | 28% | 240 | 395 |
| | | | | | | 32% | 552 | 698 |
| | | | | | | 28% | 279 | 458 |
| | | | | | | 25% | 522 | 683 |
| | | | | | | 28% | 552 | 719 |
| | | | | | | 48% | 417 | 503 |
| | | | | | | 57% | 738 | 794 |
| | | | | | | 39% | 558 | 680 |
| | | | | | | 35% | 720 | 803 |
| | | | | | | 55% | 159 | 218 |
| | | | | | | 42% | 426 | 509 |
| | | | | | | 37% | 426 | 521 |
| | | | | | | 48% | 846 | 944 |
| | | | | | | 54% | 159 | 230 |
| | | | | | | 30% | 417 | 515 |
| | | | | | | 35% | 699 | 800 |
| | | | | | | 27% | 150 | 311 |
| | | | | | | 34% | 402 | 506 |
| | | | | | | 37% | 273 | 377 |
| | | | | | | 36% | 150 | 239 |
| | | | | | | 35% | 552 | 677 |
| | | | | | | 36% | 147 | 245 |
| | | | | | | 36% | 552 | 683 |
| | | | | | | 32% | 414 | 524 |
| | | | | | | 35% | 405 | 566 |
| | | | | | | 40% | 405 | 509 |
| | | | | | | 31% | 561 | 683 |
| | | | | | | 24% | 807 | 953 |
| | | | | | | 34% | 279 | 392 |
| | | | | | | 38% | 435 | 527 |
| | | | | | | 33% | 279 | 395 |
| | | | | | | 41% | 729 | 815 |
| | | | | | | 38% | 252 | 353 |
| | | | | | | 38% | 279 | 395 |
| | | | | | | 32% | 276 | 395 |
| | | | | | | 39% | 411 | 509 |
| | | | | | | 28% | 252 | 398 |
| | | | | | | 45% | 444 | 515 |
| | | | | | | 31% | 813 | 953 |
| | | | | | | 31% | 690 | 794 |
| | | | | | | 35% | 279 | 395 |
| | | | | | | 45% | 729 | 794 |
| | | | | | | 33% | 426 | 524 |
| | | | | | | 45% | 468 | 539 |
| | | | | | | 50% | 435 | 494 |
| | | | | | | 40% | 153 | 233 |
| | | | | | | 31% | 816 | 947 |
| | | | | | | 32% | 702 | 794 |
| | | | | | | 42% | 555 | 638 |
| | | | | | | 46% | 585 | 662 |
| | | | | | | 39% | 165 | 233 |
| | | | | | | 58% | 159 | 209 |
| | | | | | | 42% | 732 | 794 |
| | | | | | | 33% | 183 | 254 |
| | | | | | | 38% | 729 | 791 |
| | | | | | | 30% | 582 | 698 |
| | | | | | | 47% | 162 | 224 |
| | | | | | | 38% | 156 | 233 |
| | | | | | | 45% | 165 | 230 |
| | | | | | | 35% | 147 | 239 |
| | | | | | | 36% | 591 | 680 |
| | | | | | | 30% | 561 | 680 |
| | | | | | | 29% | 150 | 230 |
| | | | | | | 35% | 303 | 395 |
| | | | | | | 40% | 732 | 791 |
| | | | | | | 39% | 717 | 800 |
| | | | | | | 36% | 564 | 662 |
| | | | | | | 26% | 306 | 395 |
| | | | | | | 38% | 603 | 680 |
| | | | | | | 32% | 588 | 680 |
| | | | | | | 33% | 846 | 944 |
| | | | | | | 26% | 534 | 680 |
| | | | | | | 28% | 732 | 815 |
| | | | | | | 33% | 417 | 524 |
| | | | | | | 45% | 183 | 242 |
| | | | | | | 40% | 435 | 494 |
| | | | | | | 30% | 846 | 944 |
| | | | | | | 40% | 732 | 806 |
| | | | | | | 25% | 432 | 524 |
| | | | | | | 32% | 852 | 944 |
| | | | | | | 26% | 147 | 215 |
| | | | | | | 37% | 387 | 467 |
| | | | | | | 37% | 729 | 800 |
| | | | | | | 43% | 468 | 515 |
| | | | | | | 37% | 270 | 350 |
| | | | | | | 28% | 309 | 392 |
| | | | | | | 30% | 882 | 959 |
| | | | | | | 30% | 147 | 224 |
| | | | | | | 45% | 774 | 806 |
| | | | | | | 46% | 771 | 815 |
| HYABP53 | 1027455 | 18 | blastx.14 | gp42 [Rattus rattus] | gi\|56306\|emb\|CAA39 | 38% | 57 | 323 |
| | | | | | 831.1\| | 75% | 324 | 347 |
| HYABP53 | 971448 | 84 | HMMER | PFAM: Immunoglobulin | PF00047 | 27.8 | 257 | 427 |
| | | | 2.1.1 | domain | | | | |
| HHFML49 | 963278 | 19 | blastx.14 | immunoglobulin | gi\|4099555\|gb\|AAD0 | 48% | 690 | 980 |
| | | | | superfamily member | 9632.1\| | 37% | 339 | 683 |
| | | | | [Drosophila melanogaster] | | 34% | 240 | 644 |
| | | | | | | 33% | 711 | 1025 |
| | | | | | | 34% | 378 | 620 |
| | | | | | | 35% | 729 | 968 |
| | | | | | | 27% | 516 | 821 |
| | | | | | | 41% | 114 | 266 |
| | | | | | | 58% | 1053 | 1160 |
| | | | | | | 36% | 1447 | 1644 |
| | | | | | | 35% | 528 | 689 |
| | | | | | | 56% | 1062 | 1151 |
| | | | | | | 42% | 1354 | 1473 |
| | | | | | | 40% | 270 | 374 |
| | | | | | | 45% | 759 | 863 |
| | | | | | | 33% | 525 | 668 |
| | | | | | | 22% | 309 | 560 |
| | | | | | | 26% | 1357 | 1470 |
| | | | | | | 44% | 1062 | 1142 |
| | | | | | | 38% | 738 | 854 |
| | | | | | | 25% | 837 | 998 |
| | | | | | | 27% | 345 | 548 |
| | | | | | | 25% | 114 | 293 |
| | | | | | | 37% | 279 | 365 |
| | | | | | | 29% | 837 | 947 |
| | | | | | | 32% | 711 | 803 |
| | | | | | | 43% | 720 | 809 |
| | | | | | | 45% | 1354 | 1419 |
| | | | | | | 34% | 1534 | 1647 |
| | | | | | | 29% | 114 | 278 |
| | | | | | | 37% | 837 | 917 |
| | | | | | | 34% | 9 | 86 |
| | | | | | | 32% | 1516 | 1626 |
| | | | | | | 28% | 729 | 905 |
| | | | | | | 32% | 720 | 812 |
| | | | | | | 34% | 1537 | 1623 |
| | | | | | | 34% | 1053 | 1157 |
| | | | | | | 40% | 1543 | 1617 |
| | | | | | | 25% | 345 | 560 |
| | | | | | | 43% | 624 | 671 |
| | | | | | | 44% | 444 | 497 |
| | | | | | | 38% | 561 | 623 |
| | | | | | | 42% | 132 | 194 |
| | | | | | | 30% | 462 | 560 |
| | | | | | | 39% | 1546 | 1614 |
| | | | | | | 25% | 1435 | 1518 |
| | | | | | | 31% | 1546 | 1641 |
| | | | | | | 44% | 1366 | 1419 |
| | | | | | | 34% | 411 | 497 |
| | | | | | | 21% | 9 | 107 |
| | | | | | | 30% | 1053 | 1121 |
| | | | | | | 18% | 1366 | 1626 |
| | | | | | | 34% | 648 | 725 |
| | | | | | | 33% | 864 | 926 |
| | | | | | | 24% | 426 | 512 |
| HHFML49 | 961194 | 85 | blastx.14 | immunoglobulin | gi\|4099555\|gb\|AAD0 | 48% | 689 | 979 |
| | | | | superfamily member | 9632.1\| | 40% | 240 | 521 |
| | | | | [Drosophila melanogaster] | | 33% | 710 | 1024 |
| | | | | | | 48% | 536 | 682 |
| | | | | | | 35% | 728 | 967 |
| | | | | | | 41% | 114 | 266 |
| | | | | | | 58% | 1052 | 1159 |
| | | | | | | 26% | 548 | 820 |
| | | | | | | 36% | 1445 | 1642 |
| | | | | | | 31% | 339 | 545 |
| | | | | | | 40% | 378 | 524 |
| | | | | | | 56% | 1061 | 1150 |
| | | | | | | 36% | 548 | 688 |
| | | | | | | 42% | 1352 | 1471 |
| | | | | | | 40% | 270 | 374 |
| | | | | | | 35% | 542 | 667 |
| | | | | | | 45% | 758 | 862 |
| | | | | | | 28% | 345 | 563 |
| | | | | | | 26% | 1355 | 1468 |
| | | | | | | 44% | 1061 | 1141 |
| | | | | | | 21% | 309 | 557 |
| | | | | | | 25% | 836 | 997 |
| | | | | | | 25% | 114 | 293 |
| | | | | | | 37% | 279 | 365 |
| | | | | | | 29% | 836 | 946 |
| | | | | | | 43% | 719 | 808 |
| | | | | | | 29% | 114 | 278 |
| | | | | | | 45% | 1352 | 1417 |
| | | | | | | 34% | 1532 | 1645 |
| | | | | | | 34% | 9 | 86 |
| | | | | | | 28% | 728 | 904 |
| | | | | | | 32% | 719 | 811 |
| | | | | | | 34% | 1535 | 1621 |
| | | | | | | 33% | 548 | 619 |
| | | | | | | 26% | 345 | 503 |
| | | | | | | 29% | 462 | 593 |
| | | | | | | 44% | 444 | 497 |
| | | | | | | 38% | 560 | 622 |
| | | | | | | 42% | 132 | 194 |
| | | | | | | 54% | 638 | 670 |
| | | | | | | 39% | 1544 | 1612 |
| | | | | | | 34% | 411 | 497 |
| | | | | | | 25% | 1433 | 1516 |
| | | | | | | 44% | 1364 | 1417 |
| | | | | | | 21% | 9 | 107 |
| | | | | | | 24% | 426 | 512 |
| | | | | | | 18% | 1364 | 1624 |
| | | | | | | 34% | 647 | 724 |
| | | | | | | 33% | 863 | 925 |
| HNTAR65 | 971373 | 20 | HMMER | PFAM: Immunoglobulin | PF00047 | 77.1 | 925 | 1128 |
| | | | 2.1.1 | domain | | | | |
| | | | blastx | (AK001707) unnamed | dbj\|BAA91850.1\| | 98% | 1054 | 1683 |
| | | | | protein product [Homo | | | | |
| | | | | sapiens] | | | | |
| HAGAS06 | 1048042 | 21 | blastx.14 | (AK001332) unnamed | gi\|7022525\|dbj\|BAA9 | 55% | 399 | 1178 |
| | | | | protein product [Homo | 1631.1\| | 51% | 2 | 442 |
| | | | | sapiens] | | | | |
| HS2SH04 | 1129140 | 22 | blastx.14 | Dutt1 protein [Mus | gi\|3688436\|emb\|CAA | 44% | 116 | 331 |
| | | | | musculus] | 76850.1\| | | | |
| HS2SH04 | 947971 | 86 | HMMER | PFAM: Immunoglobulin | PF00047 | 22.5 | 226 | 331 |
| | | | 2.1.1 | domain | | | | |
| | | | blastx | Dutt1 protein [Mus | emb\|CAA76850.1\| | 44% | 116 | 331 |
| | | | | musculus] | | | | |
| HAHFI44 | 1135445 | 23 | blastx.14 | (AF151909) CGI-151 | gi\|4929771\|gb\|AAD3 | 70% | 9 | 635 |
| | | | | protein [Homo sapiens] | 4146.1\|AF151909_1 | 36% | 336 | 620 |
| | | | | | | 30% | 81 | 200 |
| | | | | | | 63% | 654 | 719 |
| | | | | | | 39% | 504 | 641 |
| | | | | | | 35% | 204 | 320 |
| HAHFI44 | 910942 | 87 | HMMER | PFAM: IG | PF00047 | 27.42 | 379 | 567 |
| | | | 1.8 | (immunoglobulin) | | | | |
| | | | | superfamily | | | | |
| | | | blastx.2 | (AF151909) CGI-151 | gb\|AAD34146.1\|AF1 | 60% | 266 | 702 |
| | | | | protein [Homo sapiens] | 51909_1 | 76% | 9 | 122 |
| | | | | | | 52% | 128 | 286 |
| | | | | | | 36% | 334 | 618 |
| HAPPY24 | 844293 | 88 | HMMER | PFAM: IG | PF00047 | 3.16 | 17 | 181 |
| | | | 1.8 | (immunoglobulin) | | | | |
| | | | | superfamily | | | | |
| | | | blastx.2 | (AJ130710) QA79 | emb\|CAB51126.1\| | 92% | 2 | 268 |
| | | | | membrane protein, allelic | | 100% | 237 | 365 |
| | | | | variant airm-1b [Homo | | 44% | 370 | 525 |
| | | | | sapiens] | | 68% | 461 | 523 |
| | | | | | | 36% | 443 | 517 |
| HBCBF11 | 1204344 | 25 | blastx.14 | Cell adhesion molecule | sp\|AAF63685\|AAF63 | 36% | 8 | 196 |
| | | | | nectin-3 alpha. | 685 | 46% | 344 | 439 |
| | | | | | | 50% | 209 | 268 |
| | | | | | | 44% | 260 | 340 |
| HBCBF11 | 947959 | 89 | HMMER | PFAM: Immunoglobulin | PF00047 | 23.7 | 221 | 385 |
| | | | 2.1.1 | domain | | | | |
| | | | blastx.2 | (AL050071) hypothetical | emb\|CAB43256.1\| | 40% | 5 | 439 |
| | | | | protein [Homo sapiens] | | | | |
| HBJHS02 | 948293 | 26 | HMMER | PFAM: Immunoglobulin | PF00047 | 21 | 130 | 303 |
| | | | 2.1.1 | domain | | | | |
| | | | blastx.2 | IgG Fc receptor I [Homo | gb\|AAA35678.1\| | 53% | 76 | 363 |
| | | | | sapiens] | | | | |
| HRDFA94 | 577352 | 27 | HMMER | PFAM: IG | PF00047 | 19.15 | 678 | 472 |
| | | | 1.8 | (immunoglobulin) | | | | |
| | | | | superfamily | | | | |
| | | | blastx | sialoadhesin [Mus | emb\|CAA85268.1\| | 78% | 720 | 421 |
| | | | | musculus] | | 35% | 705 | 442 |
| | | | | | | 51% | 561 | 433 |
| | | | | | | 39% | 720 | 553 |
| | | | | | | 36% | 561 | 424 |
| | | | | | | 37% | 735 | 583 |
| | | | | | | 47% | 687 | 586 |
| | | | | | | 38% | 537 | 421 |
| | | | | | | 46% | 723 | 685 |
| | | | | | | 70% | 736 | 707 |
| HRDFA94 | 937804 | 91 | HMMER | PFAM: Immunoglobulin | PF00047 | 140.4 | 451 | 609 |
| | | | 2.1.1 | domain | | | | |
| | | | blastx.2 | sialoadhesin [Mus | emb\|CAA85290.1\| | 71% | 10 | 1572 |
| | | | | musculus] | | 32% | 334 | 1572 |
| | | | | | | 36% | 580 | 1572 |
| | | | | | | 35% | 583 | 1572 |
| | | | | | | 35% | 583 | 1572 |
| | | | | | | 32% | 436 | 1512 |
| | | | | | | 31% | 451 | 1230 |
| | | | | | | 27% | 4 | 666 |
| HNTCU89 | 975097 | 28 | HMMER | PFAM: Immunoglobulin | PF00047 | 41.3 | 1710 | 1528 |
| | | | 2.1.1 | domain | | | | |
| | | | blastx | predicted protein contains | emb\|CAA87335.1\| | 30% | 1608 | 1354 |
| | | | | a large number of Ig | | 44% | 1608 | 1435 |
| | | | | superfamily 1 1 gene; | | 41% | 1608 | 1456 |
| | | | | cDNA EST yk248d7.3 | | 36% | 1629 | 1450 |
| | | | | comes from this gene; c | | 36% | 1653 | 1465 |
| | | | | | | 38% | 1611 | 1432 |
| | | | | | | 34% | 1644 | 1453 |
| | | | | | | 38% | 1452 | 1351 |
| | | | | | | 44% | 1581 | 1468 |
| | | | | | | 32% | 1620 | 1465 |
| | | | | | | 32% | 1608 | 1432 |
| | | | | | | 36% | 1446 | 1333 |
| | | | | | | 36% | 1590 | 1453 |
| | | | | | | 37% | 1608 | 1465 |
| | | | | | | 27% | 1608 | 1468 |
| | | | | | | 54% | 1422 | 1351 |
| | | | | | | 48% | 1437 | 1351 |
| | | | | | | 36% | 1581 | 1432 |
| | | | | | | 53% | 1440 | 1351 |
| | | | | | | 48% | 1431 | 1351 |
| | | | | | | 34% | 1584 | 1456 |
| | | | | | | 46% | 1584 | 1456 |
| | | | | | | 36% | 1611 | 1456 |
| | | | | | | 35% | 1611 | 1432 |
| | | | | | | 26% | 1479 | 1345 |
| | | | | | | 40% | 1446 | 1351 |
| | | | | | | 35% | 1587 | 1477 |
| | | | | | | 40% | 1551 | 1441 |
| | | | | | | 50% | 1419 | 1348 |
| | | | | | | 50% | 1719 | 1630 |
| | | | | | | 32% | 1728 | 1627 |
| | | | | | | 40% | 1710 | 1585 |
| | | | | | | 41% | 1581 | 1465 |
| | | | | | | 35% | 1728 | 1618 |
| | | | | | | 38% | 1728 | 1612 |
| | | | | | | 28% | 1611 | 1441 |
| | | | | | | 40% | 1416 | 1351 |
| | | | | | | 34% | 1611 | 1465 |
| | | | | | | 39% | 1722 | 1639 |
| | | | | | | 40% | 1431 | 1351 |
| | | | | | | 39% | 1719 | 1621 |
| | | | | | | 41% | 1581 | 1465 |
| | | | | | | 38% | 1581 | 1456 |
| | | | | | | 45% | 1416 | 1351 |
| | | | | | | 40% | 1419 | 1354 |
| | | | | | | 35% | 1452 | 1351 |
| | | | | | | 44% | 1716 | 1630 |
| | | | | | | 30% | 1590 | 1462 |
| | | | | | | 32% | 1626 | 1471 |
| | | | | | | 37% | 1545 | 1450 |
| | | | | | | 28% | 1608 | 1471 |
| | | | | | | 31% | 1719 | 1615 |
| | | | | | | 43% | 1719 | 1630 |
| | | | | | | 54% | 1422 | 1357 |
| | | | | | | 22% | 1725 | 1606 |
| | | | | | | 26% | 1716 | 1561 |
| | | | | | | 29% | 1602 | 1471 |
| | | | | | | 34% | 1701 | 1579 |
| | | | | | | 41% | 1422 | 1351 |
| | | | | | | 35% | 1713 | 1630 |
| | | | | | | 32% | 1557 | 1465 |
| | | | | | | 40% | 1701 | 1621 |
| | | | | | | 36% | 1719 | 1630 |
| | | | | | | 20% | 1446 | 1195 |
| | | | | | | 31% | 1566 | 1462 |
| | | | | | | 27% | 1617 | 1465 |
| | | | | | | 41% | 1422 | 1351 |
| | | | | | | 35% | 1728 | 1618 |
| | | | | | | 33% | 1419 | 1330 |
| | | | | | | 23% | 1479 | 1351 |
| | | | | | | 39% | 1713 | 1630 |
| | | | | | | 30% | 1719 | 1621 |
| | | | | | | 36% | 1560 | 1471 |
| | | | | | | 38% | 1728 | 1651 |
| | | | | | | 27% | 1716 | 1630 |
| | | | | | | 35% | 1689 | 1606 |
| | | | | | | 33% | 1719 | 1630 |
| | | | | | | 28% | 1431 | 1357 |
| | | | | | | 29% | 1701 | 1621 |
| | | | | | | 43% | 1677 | 1630 |
| | | | | | | 32% | 1701 | 1618 |
| | | | | | | 29% | 1713 | 1621 |
| | | | | | | 39% | 1440 | 1372 |
| | | | | | | 26% | 1701 | 1612 |
| | | | | | | 42% | 1263 | 1201 |
| | | | | | | 28% | 1431 | 1357 |
| | | | | | | 31% | 1443 | 1348 |
| | | | | | | 24% | 1719 | 1633 |
| | | | | | | 58% | 262 | 227 |
| | | | | | | 24% | 1701 | 1591 |
| | | | | | | 35% | 1131 | 1048 |
| HAPNO50 | 834384 | 92 | blastx.2 | (AL050297) hypothetical | emb\|CAB43396.1\| | 86% | 823 | 263 |
| | | | | protein [Homo sapiens] | | 98% | 1119 | 814 |
| | | | | | | 88% | 1143 | 1117 |
| HKACI15 | 892363 | 30 | HMMER | PFAM: Immunoglobulin | PF00047 | 65.3 | 140 | 340 |
| | | | 2.1.1 | domain | | | | |
| | | | blastx.2 | (AF111713) junctional | gb\|AAD42050.1\|AF1 | 92% | 143 | 904 |
| | | | | adhesion molecule [Homo | 11713_1 | 100% | 77 | 106 |
| | | | | sapiens] | | | | |
| HMSNC17 | 1207838 | 31 | blastx.14 | EPITHELIAL V-LIKE | sp\|O60487\|O60487 | 40% | 192 | 443 |
| | | | | ANTIGEN PRECURSOR | | | | |
| | | | | (EPITHELIAL V-LIKE 1 | | | | |
| HMSNC17 | 903712 | 93 | HMMER | PFAM: IG | PF00047 | 4.46 | 280 | 339 |
| | | | 1.8 | (immunoglobulin) | | | | |
| | | | | superfamily | | | | |
| | | | blastx | unnamed protein product | emb\|CAB42187.1\| | 85% | 12 | 134 |
| | | | | [unidentified] | | 33% | 535 | 588 |
| HOFMP09 | 943358 | 32 | HMMER | PFAM: Immunoglobulin | PF00047 | 27.5 | 34 | 144 |
| | | | 2.1.1 | domain | | | | |
| | | | blastx | B-CAM [Homo sapiens] | emb\|CAA56327.1\| | 76% | 31 | 351 |
| | | | | | | 49% | 300 | 494 |
| | | | | | | 85% | 473 | 553 |
| | | | | | | 33% | 247 | 372 |
| | | | | | | 46% | 283 | 327 |
| | | | | | | 43% | 91 | 138 |
| HSXBF22 | 952744 | 33 | HMMER | PFAM: Extracellular link | PF00193 | 155.1 | 699 | 983 |
| | | | 2.1.1 | domain | | | | |
| | | | blastx.2 | cartilage link protein | emb\|CAA35462.1\| | 41% | 312 | 989 |
| | | | | [Homo sapiens] | | 50% | 1006 | 1269 |
| | | | | | | 47% | 1024 | 1278 |
| HSXBF22 | 952874 | 94 | HMMER | PFAM: Extracellular link | PF00193 | 155.1 | 699 | 983 |
| | | | 2.1.1 | domain | | | | |
| | | | blastx.14 | cartilage link protein | gi\|34378\|emb\|CAA35 | 47% | 426 | 884 |
| | | | | [Homo sapiens] | 462.1\| | 56% | 1007 | 1192 |
| | | | | | | 67% | 1115 | 1198 |
| | | | | | | 68% | 828 | 884 |
| | | | | | | 30% | 312 | 458 |
| | | | | | | 42% | 933 | 1016 |
| | | | | | | 37% | 1208 | 1279 |
| | | | | | | 42% | 1025 | 1108 |
| | | | | | | 35% | 738 | 821 |
| | | | | | | 40% | 1205 | 1270 |
| HHFME38 | 947970 | 35 | HMMER | PFAM: IG | PF00047 | 31.1 | 203 | 391 |
| | | | 1.8 | (immunoglobulin) | | | | |
| | | | | superfamily | | | | |
| | | | blastx.2 | (AL049946) hypothetical | emb\|CAB43220.1\| | 34% | 11 | 451 |
| | | | | protein [Homo sapiens] | | 31% | 8 | 571 |
| | | | | | | 32% | 2 | 436 |
| | | | | | | 30% | 11 | 460 |
| | | | | | | 27% | 185 | 556 |
| | | | | | | 33% | 448 | 546 |
| HHSGV13 | 943090 | 36 | HMMER | PFAM: Immunoglobulin | PF00047 | 22.8 | 145 | 384 |
| | | | 2.1.1 | domain | | | | |
| | | | blastx.2 | unnamed protein product | emb\|CAB42187.1\| | 100% | 7 | 105 |
| | | | | [unidentified] | | | | |
| HLQBY46 | 672134 | 95 | HMMER | PFAM: IG | PF00047 | 5.81 | 219 | 302 |
| | | | 1.8 | (immunoglobulin) | | | | |
| | | | | superfamily | | | | |
| | | | blastx.2 | soluble vascular | gb\|AAC50060.1\| | 82% | 132 | 416 |
| | | | | endothelial cell growth | | | | |
| | | | | factor receptor [Homo | | | | |
| | | | | sapiens] | | | | |
| HE8DY76 | 877906 | 97 | HMMER | PFAM: IG | PF00047 | 11.31 | 18 | 131 |
| | | | 1.8 | (immunoglobulin) | | | | |
| | | | | superfamily | | | | |
| | | | blastx | (AL049946) hypothetical | emb\|CAB43220.1\| | 44% | 36 | 260 |
| | | | | protein [Homo sapiens] | | 50% | 256 | 471 |
| | | | | | | 36% | 36 | 242 |
| | | | | | | 30% | 51 | 257 |
| | | | | | | 45% | 352 | 471 |
| | | | | | | 42% | 69 | 152 |
| | | | | | | 23% | 24 | 179 |
| | | | | | | 34% | 265 | 333 |
| | | | | | | 40% | 367 | 441 |
| | | | | | | 27% | 334 | 474 |
| | | | | | | 27% | 265 | 330 |
| | | | | | | 37% | 355 | 441 |
| | | | | | | 35% | 265 | 315 |
| HE8DY76 | 887614 | 98 | HMMER | PFAM: Immunoglobulin | PF00047 | 23.8 | 55 | 261 |
| | | | 2.1.1 | domain | | | | |
| HMWDB84 | 1111014 | 39 | blastx.14 | (AF199028) B7-like | gi\|6983944\|gb\|AAF34 | 90% | 266 | 1114 |
| | | | | protein [Homo sapiens] | 739.1\|AF199028_1 | | | |
| HMWDB84 | 899872 | 99 | HMMER | PFAM: Immunoglobulin | PF00047 | 26.9 | 217 | 474 |
| | | | 2.1.1 | domain | | | | |
| | | | blastx | (AF199028) B7-like | gb\|AAF34739.1\|AF1 | 99% | 130 | 1026 |
| | | | | protein [Homo sapiens] | 99028_1 | | | |
| HMWDB84 | 944569 | 100 | blastx.2 | (AF199028) B7-like | gb\|AAF34739.1\|AF1 | 90% | 19 | 183 |
| | | | | protein [Homo sapiens] | 99028_1 | | | |
| HMWDB84 | 944570 | 101 | HMMER | PFAM: Immunoglobulin | PF00047 | 26.9 | 216 | 473 |
| | | | 2.1.1 | domain | | | | |
| | | | blastx.2 | (AF199028) B7-like | gb\|AAF34739.1\|AF1 | 99% | 129 | 1025 |
| | | | | protein [Homo sapiens] | 99028_1 | | | |
| HNECM88 | 974717 | 40 | HMMER | PFAM: Immunoglobulin | PF00047 | 28.3 | 364 | 438 |
| | | | 2.1.1 | domain | | | | |
| | | | blastx | OB binding protein-2 | gb\|AAB70703.1\| | 94% | 4 | 288 |
| | | | | [Homo sapiens] | | 48% | 313 | 510 |
| | | | | | | 33% | 402 | 572 |
| | | | | | | 30% | 361 | 468 |
| HOFNC80 | 835718 | 41 | HMMER | PFAM: IG | PF00047 | 11.98 | 148 | 291 |
| | | | 1.8 | (immunoglobulin) | | | | |
| | | | | superfamily | | | | |
| | | | blastx | (AF111714) junctional | gb\|AAD42051.1\|AF1 | 71% | 28 | 303 |
| | | | | adhesion molecule [Bos | 11714_1 | 94% | 306 | 362 |
| | | | | taurus] | | 33% | 306 | 359 |
| HE6GK65 | 1155065 | 42 | blastx.14 | (AC004010) similar to | gi\|2781386\|gb\|AAB9 | 34% | 140 | 415 |
| | | | | Leucine-rich | 6869.1\| | 48% | 2 | 112 |
| | | | | transmembrane 1 | | 26% | 542 | 700 |
| | | | | | | 64% | 914 | 964 |
| | | | | | | 88% | 722 | 748 |
| | | | | | | 66% | 137 | 172 |
| | | | | | | 28% | 5 | 151 |
| HE6GK65 | 969661 | 102 | HMMER | PFAM: Immunoglobulin | PF00047 | 20.7 | 463 | 648 |
| | | | 2.1.1 | domain | | | | |
| | | | blastx | (AC004010) similar to | gb\|AAB96869.1\| | 33% | 139 | 414 |
| | | | | Leucine-rich | | 64% | 721 | 813 |
| | | | | transmembrane proteins; | | 48% | 1 | 111 |
| | | | | 44% 1 | | 26% | 541 | 699 |
| | | | | | | 32% | 814 | 963 |
| | | | | | | 50% | 760 | 813 |
| | | | | | | 37% | 148 | 243 |
| | | | | | | 66% | 136 | 171 |
| | | | | | | 28% | 4 | 150 |
| HETGL74 | 947978 | 43 | HMMER | PFAM: IG | PF00047 | 15.57 | 213 | 392 |
| | | | 1.8 | (immunoglobulin) | | | | |
| | | | | superfamily | | | | |
| | | | blastx.2 | FOLLISTATIN-LIKE 2 | sp\|Q61581\|Q61581 | 36% | 132 | 440 |
| | | | | (FOLLISTATIN-LIKE | | | | |
| | | | | PROTEIN). | | | | |
| HETIY94 | 940755 | 103 | HMMER | PFAM: IG | PF00047 | 9.93 | 70 | 123 |
| | | | 1.8 | (immunoglobulin) | | | | |
| | | | | superfamily | | | | |
| | | | blastx | (AF119668) lipolysis- | gb\|AAD30029.1\|AF1 | 53% | 49 | 336 |
| | | | | stimulated remnant | 19668_1 | 52% | 535 | 597 |
| | | | | receptor alpha' subunit | | | | |
| | | | | [Rattus norvegicus] | | | | |
| HETLT82 | 883273 | 45 | HMMER | PFAM: IG | PF00047 | 30.56 | 319 | 519 |
| | | | 1.8 | (immunoglobulin) | | | | |
| | | | | superfamily | | | | |
| | | | blastx | (AK000358) unnamed | dbj\|BAA91108.1\| | 73% | 469 | 513 |
| | | | | protein product [Homo | | 40% | 298 | 402 |
| | | | | sapiens] | | 84% | 547 | 585 |
| | | | | | | 43% | 600 | 647 |
| HFIHF63 | 944246 | 104 | HMMER | PFAM: Immunoglobulin | PF00047 | 22.4 | 92 | 364 |
| | | | 2.1.1 | domain | | | | |
| HNGEO79 | 1129426 | 47 | blastx.14 | (AF143185) high affinity | gi\|4973136\|gb\|AAD3 | 54% | 287 | 385 |
| | | | | immunoglobulin 1 | 4946.1\|AF143185_1 | 41% | 404 | 520 |
| | | | | | | 77% | 230 | 283 |
| | | | | | | 31% | 1500 | 1595 |
| | | | | | | 36% | 140 | 214 |
| HNGEO79 | 951489 | 106 | HMMER | PFAM: IG | PF00047 | 33.71 | 290 | 466 |
| | | | 1.8 | (immunoglobulin) | | | | |
| | | | | superfamily | | | | |
| | | | blastx | (AF143185) high affinity | gb\|AAD34946.1\|AF1 | 54% | 287 | 385 |
| | | | | immunoglobulin gamma | 43185_1 | 41% | 404 | 520 |
| | | | | Fc 1 | | 77% | 230 | 283 |
| | | | | | | 36% | 140 | 214 |
| HHFCI36 | 844285 | 48 | HMMER | PFAM: IG | PF00047 | 13.32 | 10 | 180 |
| | | | 1.8 | (immunoglobulin) | | | | |
| | | | | superfamily | | | | |
| | | | blastx.2 | (AL049946) hypothetical | emb\|CAB43220.1\| | 94% | 1 | 348 |
| | | | | protein [Homo sapiens] | | 30% | 10 | 348 |
| HHPDX35 | 1223118 | 49 | blastx.14 | glial cell membrane | pir\|A58532\|A58532 | 68% | 683 | 1246 |
| | | | | glycoprotein LIG-1 | | 57% | 12 | 605 |
| | | | | precursor - mouse | | 65% | 1343 | 1507 |
| | | | | | | 42% | 604 | 813 |
| | | | | | | 44% | 27 | 215 |
| | | | | | | 36% | 18 | 212 |
| | | | | | | 37% | 3 | 212 |
| | | | | | | 43% | 932 | 1075 |
| | | | | | | 31% | 3 | 212 |
| | | | | | | 42% | 78 | 212 |
| | | | | | | 28% | 1076 | 1255 |
| | | | | | | 38% | 3 | 143 |
| | | | | | | 30% | 45 | 212 |
| | | | | | | 34% | 117 | 212 |
| | | | | | | 35% | 3 | 119 |
| | | | | | | 32% | 39 | 149 |
| | | | | | | 25% | 1394 | 1522 |
| | | | | | | 43% | 33 | 101 |
| | | | | | | 38% | 2018 | 2080 |
| | | | | | | 46% | 604 | 642 |
| | | | | | | 37% | 779 | 850 |
| HHPDX35 | 810391 | 107 | HMMER | PFAM: IG | PF00047 | 9.26 | 6 | 209 |
| | | | 1.8 | (immunoglobulin) | | | | |
| | | | | superfamily | | | | |
| HHPDX35 | 948421 | 108 | HMMER | PFAM: Leucine rich | PF01463 | 41.6 | 210 | 356 |
| | | | 2.1.1 | repeat C-terminal domain | | | | |
| | | | blastx.2 | membrane glycoprotein | dbj\|BAA11416.1\| | 64% | 12 | 674 |
| | | | | [Mus musculus] | | | | |
| HIBEV89 | 922757 | 50 | HMMER | PFAM: IG | PF00047 | 3.36 | 594 | 788 |
| | | | 1.8 | (immunoglobulin) | | | | |
| | | | | superfamily | | | | |
| | | | blastx.2 | (AF137367) VPS10 | gb\|AAF24748.1\|AF1 | 94% | 309 | 1103 |
| | | | | domain receptor protein | 37367_1 | 87% | 1 | 318 |
| | | | | SORCS [Mus musculus] | | 72% | 251 | 304 |
| HLDBL95 | 811269 | 51 | HMMER | PEAM: IG | PF00047 | 3.27 | 352 | 420 |
| | | | 1.8 | (immunoglobulin) | | | | |
| | | | | superfamily | | | | |
| | | | blastx.2 | (AF134918) semaphorin | gb\|AAD30541.1\|AF1 | 78% | 205 | 444 |
| | | | | subclass 4 member G | 34918_1 | 70% | 2 | 211 |
| | | | | [Mus musculus] | | 50% | 228 | 269 |
| HLDBM06 | 1189003 | 52 | blastx.14 | surface protein MCA-32 | gi\|1136501\|gb\|AAC5 | 46% | 134 | 487 |
| | | | | [Rattus norvegicus] | 2339.1\| | 45% | 1013 | 1111 |
| | | | | | | 33% | 881 | 997 |
| HLDBM06 | 878341 | 110 | HMMER | PFAM: IG | PF00047 | 11.16 | 266 | 436 |
| | | | 1.8 | (immunoglobulin) | | | | |
| | | | | superfamily | | | | |
| | | | blastx.2 | surface protein MCA-32 | gb\|AAC52339.1\| | 46% | 134 | 487 |
| | | | | [Rattus norvegicus] | | | | |
| HLHDR39 | 523499 | 53 | HMMER | PFAM: IG | PF00047 | 4.05 | 370 | 420 |
| | | | 1.8. | (immunoglobulin) | | | | |
| | | | | superfamily | | | | |
| HLJDQ79 | 774667 | 54 | HMMER | PFAM: IG | PF00047 | 3.5 | 182 | 265 |
| | | | 1.8 | (immunoglobulin) | | | | |
| | | | | superfamily | | | | |
| HLWAV41 | 1156377 | 55 | blastx.14 | (AF031174) Ig-like | gi\|3766136\|gb\|AAC7 | 91% | 630 | 1112 |
| | | | | membrane protein [Homo | 2013.1\| | 99% | 137 | 529 |
| | | | | sapiens] | | 100% | 37 | 138 |
| | | | | | | 47% | 242 | 448 |
| | | | | | | 42% | 206 | 415 |
| | | | | | | 35% | 257 | 526 |
| | | | | | | 41% | 699 | 899 |
| | | | | | | 30% | 2 | 235 |
| | | | | | | 24% | 152 | 523 |
| | | | | | | 47% | 717 | 875 |
| | | | | | | 31% | 702 | 884 |
| | | | | | | 32% | 143 | 346 |
| | | | | | | 26% | 702 | 857 |
| | | | | | | 37% | 741 | 899 |
| | | | | | | 28% | 152 | 319 |
| | | | | | | 30% | 2 | 118 |
| | | | | | | 100% | 2 | 37 |
| | | | | | | 32% | 95 | 187 |
| | | | | | | 29% | 702 | 803 |
| | | | | | | 30% | 407 | 523 |
| | | | | | | 29% | 218 | 310 |
| | | | | | | 21% | 401 | 523 |
| | | | | | | 80% | 547 | 576 |
| | | | | | | 35% | 797 | 880 |
| | | | | | | 27% | 38 | 157 |
| | | | | | | 50% | 361 | 402 |
| HLWAV41 | 786224 | 111 | HMMER | PFAM: IG | PF00047 | 12.06 | 250 | 312 |
| | | | 1.8 | (immunoglobulin) | | | | |
| | | | | superfamily | | | | |
| | | | blastx.2 | (AF031174) Ig-like | gb\|AAC72013.1\| | 96% | 136 | 390 |
| | | | | membrane protein [Homo | | 37% | 1 | 390 |
| | | | | sapiens] | | 100% | 36 | 137 |
| | | | | | | 39% | 139 | 390 |
| | | | | | | 26% | 37 | 399 |
| | | | | | | 30% | 1 | 117 |
| | | | | | | 100% | 1 | 36 |
| | | | | | | 25% | 227 | 406 |
| HFPEL47 | 943750 | 56 | HMMER | PFAM: Immunoglobulin | PF00047 | 31.4 | 135 | 365 |
| | | | 2.1.1 | domain | | | | |
| | | | blastx | (AJ243874) oligophrenin- | emb\|CAB56046.1\| | 99% | 3 | 596 |
| | | | | 4 [Homo sapiens] | | 53% | 618 | 695 |
| | | | | | | 100% | 595 | 630 |
| HHPTE06 | 1172242 | 57 | blastx.14 | (AB017139) Kilon [Rattus | gi\|4519558\|dbj\|BAA7 | 92% | 483 | 923 |
| | | | | norvegicus] | 5649.1\| | 100% | 96 | 293 |
| | | | | | | 95% | 295 | 480 |
| | | | | | | 33% | 307 | 378 |
| | | | | | | 30% | 687 | 764 |
| | | | | | | 29% | 561 | 632 |
| | | | | | | 29% | 406 | 477 |
| HHPTE06 | 934755 | 112 | HMMER | PFAM: IG | PF00047 | 18.78 | 20 | 133 |
| | | | 1.8 | (immunoglobulin) | | | | |
| | | | | superfamily | | | | |
| | | | blastx.2 | (AB017139) Kilon [Rattus | dbj\|BAA75649.1\| | 100% | 2 | 172 |
| | | | | norvegicus] | | 100% | 174 | 206 |
| HLMAC70 | 795928 | 113 | HMMER | PFAM: IG | PF00047 | 3.67 | 187 | 246 |
| | | | 1.8 | (immunoglobulin) | | | | |
| | | | | superfamily | | | | |
| HLWFG82 | 929647 | 59 | HMMER | PFAM: Immunoglobulin | PF00047 | 32.6 | 121 | 330 |
| | | | 2.1.1 | domain | | | | |
| | | | blastx.2 | Frazzled [Drosophila | gb\|AAC47314.1\| | 37% | 52 | 411 |
| | | | | melanogaster] | | 43% | 488 | 535 |
| HSTBK14 | 887715 | 60 | HMMER | PFAM: IG | PF00047 | 3.44 | 159 | 230 |
| | | | 1.8 | (immunoglobulin) | | | | |
| | | | | superfamily | | | | |
| | | | blastx.2 | prostaglandin F2a receptor | gb\|AAC18426.1\| | 74% | 3 | 293 |
| | | | | regulatory protein | | 96% | 295 | 369 |
| | | | | precursor [Rattus | | 26% | 3 | 248 |
| | | | | norvegicus] | | 100% | 371 | 394 |
| HE8EI09 | 915042 | 61 | HMMER | PFAM: IG | PF00047 | 5.24 | 140 | 322 |
| | | | 1.8 | (immunoglobulin) | | | | |
| | | | | superfamily | | | | |
| | | | blastx | (AF153362) adenylyl | gb\|AAD50121.1\|AF1 | 35% | 182 | 493 |
| | | | | cyclase [Dictyostelium | 53362_1 | 34% | 188 | 493 |
| | | | | discoideum] | | 40% | 182 | 436 |
| | | | | | | 31% | 179 | 493 |
| | | | | | | 33% | 182 | 493 |
| | | | | | | 29% | 101 | 223 |
| | | | | | | 53% | 179 | 223 |
| | | | | | | 40% | 164 | 223 |
| | | | | | | 47% | 170 | 220 |
| HHAUD86 | 944835 | 62 | HMMER | PFAM: Immunoglobulin | PF00047 | 27.7 | 222 | 509 |
| | | | 2.1.1 | domain | | | | |
| | | | blastx | (AJ007041) trithorax | emb\|CAB45385.1\| | 37% | 327 | 199 |
| | | | | homologue 2 [Homo | | 47% | 396 | 328 |
| | | | | sapiens] | | 37% | 460 | 389 |
| | | | | | | 75% | 87 | 64 |
| | | | | | | 85% | 84 | 64 |
| | | | | | | 53% | 144 | 106 |
| | | | | | | 58% | 153 | 118 |
| | | | | | | 50% | 444 | 397 |
| | | | | | | 70% | 216 | 187 |
| | | | | | | 70% | 39 | 10 |
| | | | | | | 75% | 87 | 64 |
| | | | | | | 40% | 552 | 493 |
| | | | | | | 58% | 169 | 134 |
| | | | | | | 54% | 216 | 184 |
| | | | | | | 83% | 81 | 64 |
| | | | | | | 42% | 123 | 67 |
| | | | | | | 42% | 336 | 295 |
| | | | | | | 31% | 477 | 382 |
| HNTRL43 | 835705 | 114 | HMMER | PFAM: IG | PF00047 | 11.38 | 266 | 319 |
| | | | 1.8 | (immunoglobulin) | | | | |
| | | | | superfamily | | | | |
| | | | blastx | hypothetical 119.5 K | pir\|JQ0405\|JQ0405 | 52% | 301 | 357 |
| | | | | protein (uvrA region) - | | 56% | 26 | 73 |
| | | | | Micrococcus 1 | | 39% | 229 | 297 |
| | | | | | | 42% | 147 | 203 |
| | | | | | | 85% | 4 | 24 |
| | | | | | | 58% | 186 | 221 |
| | | | | | | 30% | 226 | 294 |
| HPIBQ37 | 884289 | 64 | HMMER | PFAM: Immunoglobulin | PF00047 | 42 | 149 | 355 |
| | | | 2.1.1 | domain | | | | |
| | | | blastx | (AF111713) junctional | gb\|AAD42050.1\|AF1 | 100% | 89 | 385 |
| | | | | adhesion molecule [Homo | 11713_1 | 84% | 385 | 423 |
| | | | | sapiens] | | | | |
| HEEAR06 | 934722 | 115 | HMMER | PFAM: Immunoglobulin | PF00047 | 22.6 | 219 | 386 |
| | | | 2.1.1 | domain | | | | |
| | | | blastx | myosin binding protein C | gb\|AAC59644.1\| | 37% | 204 | 440 |
| | | | | [Gallus gallus] | | | | |
| | | | | | | 31% | 1 | 132 |
| | | | | | | 45% | 16 | 81 |
| | | | | | | 38% | 106 | 183 |
| HETEY43 | 911466 | 116 | HMMER | PFAM: Myosin head | PF00063 | 73.8 | 189 | 338 |
| | | | 2.1.1 | (motor domain) | | | | |
| | | | blastx | myosin [Arabidopsis | emb\|CAA84065.1\| | 45% | 192 | 437 |
| | | | | thaliana] | | 51% | 497 | 613 |
| | | | | | | 62% | 30 | 101 |
| | | | | | | 66% | 133 | 186 |
| HBJJX53 | 835733 | 117 | HMMER | PFAM: IG | PF00047 | 9.2 | 157 | 207 |
| | | | 1.8 | (immunoglobulin) | | | | |
| | | | | superfamily | | | | |
| | | | blastx.2 | (AF161081) activatory | gb\|AAD52965.1\|AF1 | 90% | 157 | 216 |
| | | | | receptor PIRIIbeta [Homo | 61081_1 | 73% | 215 | 283 |
| | | | | sapiens] | | | | |
| HBZSH19 | 578224 | 68 | HMMER | PFAM: IG | PF00047 | 4.23 | 68 | 199 |
| | | | 1.8 | (immunoglobulin) | | | | |
| | | | | superfamily | | | | |
| HCE1I41 | 1160558 | 69 | blastx.14 | (AL137451) hypothetical | gi\|6808026\|emb\|CAB | 66% | 473 | 988 |
| | | | | protein [Homo sapiens] | 70743.1\| | 64% | 995 | 1195 |
| | | | | | | 56% | 1364 | 1585 |
| | | | | | | 37% | 152 | 394 |
| | | | | | | 34% | 98 | 334 |
| | | | | | | 35% | 203 | 394 |
| | | | | | | 37% | 419 | 499 |
| | | | | | | 42% | 407 | 463 |
| | | | | | | 44% | 49 | 102 |
| | | | | | | 75% | 508 | 531 |
| HCE1I41 | 944433 | 118 | HMMER | PFAM: Leucine rich | PF01463 | 37.6 | 595 | 750 |
| | | | 2.1.1 | repeat C-terminal domain | | | | |
| | | | blastx.2 | (AL137451) hypothetical | emb\|CAB70743.1\| | 63% | 346 | 1032 |
| | | | | protein [Homo sapiens] | | 81% | 311 | 343 |
| HCEMK49 | 948028 | 70 | HMMER | PFAM: Extracellular link | PF00193 | 92.3 | 237 | 386 |
| | | | 2.1.1 | domain | | | | |
| | | | blastx.2 | BEHAB protein [Felis | emb\|CAA82216.1\| | 79% | 3 | 401 |
| | | | | catus] | | 81% | 353 | 697 |
| | | | | | | 41% | 353 | 496 |
| HCGME42 | 768283 | 71 | HMMER | PFAM: IG | PF00047 | 11.7 | 132 | 383 |
| | | | 1.8 | (immunoglobulin) | | | | |
| | | | | superfamily | | | | |
| | | | blastx.2 | (AF181660) | gb\|AAF00621.1\|AF1 | 27% | 54 | 446 |
| | | | | immunoglobulin | 81660_1 | | | |
| | | | | superfamily member | | | | |
| | | | | WM781 | | | | |
| HDAAN31 | 1207184 | 72 | blastx.14 | COXSACKIEVIRUS | sp\|P78310\|CXAR_H | 36% | 476 | 769 |
| | | | | AND ADENOVIRUS | UMAN | 44% | 1243 | 1356 |
| | | | | RECEPTOR | | 46% | 368 | 463 |
| | | | | PRECURSOR 1 | | 41% | 95 | 211 |
| | | | | PROTEIN). | | 31% | 227 | 313 |
| | | | | | | 37% | 365 | 436 |
| | | | | | | 25% | 659 | 763 |
| HDAAN31 | 951450 | 119 | HMMER | PFAM: Immunoglobulin | PF00047 | 30 | 109 | 366 |
| | | | 2.1.1 | domain | | | | |
| | | | blastx.2 | coxsackie and adenovirus | emb\|CAA68868.1\| | 35% | 58 | 741 |
| | | | | receptor protein [Homo | | | | |
| | | | | sapiens] | | | | |
| HDPSJ02 | 943316 | 73 | HMMER | PFAM: Immunoglobulin | PF00047 | 54.3 | 521 | 724 |
| | | | 2.1.1 | domain | | | | |
| HDTBO48 | 945083 | 74 | HMMER | PFAM: IG | PF00047 | 18.53 | 159 | 347 |
| | | | 1.8 | (immunoglobulin) | | | | |
| | | | | superfamily | | | | |
| | | | blastx | (AJ009698) embigin | emb\|CAA08796.1\| | 58% | 132 | 248 |
| | | | | protein [Rattus | | 75% | 273 | 356 |
| | | | | norvegicus] | | 58% | 357 | 464 |
| HE8PB92 | 940805 | 75 | HMMER | PFAM: Leucine rich | PF01463 | 40.2 | 122 | 265 |
| | | | 2.1.1 | repeat C-terminal domain | | | | |
| | | | blastx | (AL022270) Similarity to | emb\|CAB63434.1\| | 36% | 2 | 265 |
| | | | | Drosophila EGF-like | | 30% | 2 | 292 |
| | | | | protein slit (PIR 1 1 gene; | | 55% | 292 | 318 |
| | | | | cDNA EST yk322h11.3 | | | | |
| | | | | comes from this gene | | | | |
| | | | | [Caenor | | | | |
| HEGAR66 | 844291 | 76 | HMMER | PFAM: IG | PF00047 | 12.68 | 163 | 342 |
| | | | 1.8 | (immunoglobulin) | | | | |
| | | | | superfamily | | | | |
| | | | blastx | (AF004841) CDO [Homo | gb\|AAC34901.1\| | 52% | 1 | 408 |
| | | | | sapiens] | | 38% | 425 | 532 |
| | | | | | | 53% | 482 | 526 |
| | | | | | | 33% | 446 | 526 |
| HWAEU35 | 1199101 | 77 | blastx.14 | CMRF-35 antigen - | pir\|I37243\|I37243 | 55% | 8 | 163 |
| | | | | human | | 59% | 170 | 280 |
| | | | | | | 39% | 401 | 523 |
| | | | | | | 38% | 347 | 400 |
| | | | | | | 42% | 317 | 373 |
| HWAEU35 | 887166 | 120 | HMMER | PFAM: Immunoglobulin | PF00047 | 23.2 | 40 | 273 |
| | | | 2.1.1 | domain | | | | |
| | | | blastx | CMRF-35 antigen [Homo | emb\|CAA46948.1\| | 55% | 7 | 162 |
| | | | | sapiens] | | 59% | 169 | 279 |
| | | | | | | 60% | 400 | 474 |
| | | | | | | 38% | 346 | 399 |
| | | | | | | 42% | 316 | 372 |
| HWBCQ57 | 590758 | 121 | HMMER | PFAM: Class II | PF00993 | 43.3 | 294 | 368 |
| | | | 2.1.1 | histocompatibility antigen, | | | | |
| | | | | alpha domain | | | | |
| | | | blastx | DC classII | emb\|CAA25141.1\| | 100% | 40 | 288 |
| | | | | histocompatibility antigen | | 92% | 276 | 545 |
| | | | | alpha-chain [Homo | | 100% | 545 | 580 |
| | | | | sapiens] | | | | |
| HEGAO83 | 780837 | 79 | HMMER | PFAM: IG | PF00047 | 9.4 | 234 | 305 |
| | | | 1.8 | (immunoglobulin) | | | | |
| | | | | superfamily | | | | |

[0049] Table 2 further characterizes certain encoded polypeptides of the invention, by providing the results of comparisons to protein and protein family databases. The first column provides a unique clone identifier, “Clone ID NO:”, corresponding to a cDNA clone disclosed in Table 1A. The second column provides the unique contig identifier, “Contig ID:” which allows correlation with the information in Table 1A. The third column provides the sequence identifier, “SEQ ID NO:”, for the contig polynucleotide sequences. The fourth column provides the analysis method by which the homology/identity disclosed in the Table was determined. The fifth column provides a description of the PFAM/NR hit identified by each analysis. Column six provides the accession number of the PFAM/NR hit disclosed in the fifth column. Column seven, score/percent identity, provides a quality score or the percent identity, of the hit disclosed in column five. Comparisons were made between polypeptides encoded by polynucleotides of the invention and a non-redundant protein database (herein referred to as “NR”), or a database of protein families (herein referred to as “PFAM”), as described below.

[0050] The NR database, which comprises the NBRF PIR database, the NCBI GenPept database, and the SIB SwissProt and TrEMBL databases, was made non-redundant using the computer program nrdb2 (Warren Gish, Washington University in Saint Louis). Each of the polynucleotides shown in Table 1A, column 3 (e.g., SEQ ID NO:X or the ‘Query’ sequence) was used to search against the NR database. The computer program BLASTX was used to compare a 6-frame translation of the Query sequence to the NR database (for information about the BLASTX algorithm please see Altshul et al., J. Mol. Biol. 215:403-410 (1990); and Gish and States, Nat. Genet. 3:266-272 (1993). A description of the sequence that is most similar to the Query sequence (the highest scoring ‘Subject’) is shown in column five of Table 2 and the database accession number for that sequence is provided in column six. The highest scoring ‘Subject’ is reported in Table 2 if (a) the estimated probability that the match occurred by chance alone is less than 1.0e-07, and (b) the match was not to a known repetitive element. BLASTX returns alignments of short polypeptide segments of the Query and Subject sequences which share a high degree of similarity; these segments are known as High-Scoring Segment Pairs or HSPs. Table 2 reports the degree of similarity between the Query and the Subject for each HSP as a percent identity in Column 7. The percent identity is determined by dividing the number of exact matches between the two aligned sequences in the HSP, dividing by the number of Query amino acids in the HSP and multiplying by 100. The polynucleotides of SEQ ID NO:X which encode the polypeptide sequence that generates an HSP are delineated by columns 8 and 9 of Table 2.

[0051] The PFAM database, PFAM version 2. 1, (Sonnhammer et al., Nucl. Acids Res., 26:320-322, 1998)) consists of a series of multiple sequence alignments; one alignment for each protein family. Each multiple sequence alignment is converted into a probability model called a Hidden Markov Model, or HMM, that represents the position-specific variation among the sequences that make up the multiple sequence alignment (see, e.g., Durbin et al., Biological sequence analysis: probabilistic models of proteins and nucleic acids, Cambridge University Press, 1998 for the theory of HMMs). The program HMMER version 1.8 (Sean Eddy, Washington University in Saint Louis) was used to compare the predicted protein sequence for each Query sequence (SEQ ID NO:Y in Table 1A) to each of the HMMs derived from PFAM version 2.1. A HMM derived from PFAM version 2.1 was said to be a significant match to a polypeptide of the invention if the score returned by HMMER 1.8 was greater than 0.8 times the HMMER 1.8 score obtained with the most distantly related known member of that protein family. The description of the PFAM family which shares a significant match with a polypeptide of the invention is listed in column 5 of Table 2, and the database accession number of the PFAM hit is provided in column 6. Column 7 provides the score returned by HMMER version 1.8 for the alignment. Columns 8 and 9 delineate the polynucleotides of SEQ ID NO:X which encode the polypeptide sequence which show a significant match to a PFAM protein family.

[0052] As mentioned, columns 8 and 9 in Table 2, “NT From” and “NT To”, delineate the polynucleotides of “SEQ ID NO:X” that encode a polypeptide having a significant match to the PFAM/NR database as disclosed in the fifth column. In one embodiment, the invention provides a protein comprising, or alternatively consisting of, a polypeptide encoded by the polynucleotides of SEQ ID NO:X delineated in columns 8 and 9 of Table 2. Also provided are polynucleotides encoding such proteins, and the complementary strand thereto.

[0053] The nucleotide sequence SEQ ID NO:X and the translated SEQ ID NO:Y are sufficiently accurate and otherwise suitable for a variety of uses well known in the art and described further below. For instance, the nucleotide sequences of SEQ ID NO:X are useful for designing nucleic acid hybridization probes that will detect nucleic acid sequences contained in SEQ ID NO:X or the cDNA contained in Clone ID NO:Z. These probes will also hybridize to nucleic acid molecules in biological samples, thereby enabling immediate applications in chromosome mapping, linkage analysis, tissue identification and/or typing, and a variety of forensic and diagnostic methods of the invention. Similarly, polypeptides identified from SEQ ID NO:Y may be used to generate antibodies which bind specifically to these polypeptides, or fragments thereof, and/or to the polypeptides encoded by the cDNA clones identified in, for example, Table 1A.

[0054] Nevertheless, DNA sequences generated by sequencing reactions can contain sequencing errors. The errors exist as misidentified nucleotides, or as insertions or deletions of nucleotides in the generated DNA sequence. The erroneously inserted or deleted nucleotides cause frame shifts in the reading frames of the predicted amino acid sequence. In these cases, the predicted amino acid sequence diverges from the actual amino acid sequence, even though the generated DNA sequence may be greater than 99.9% identical to the actual DNA sequence (for example, one base insertion or deletion in an open reading frame of over 1000 bases).

[0055] Accordingly, for those applications requiring precision in the nucleotide sequence or the amino acid sequence, the present invention provides not only the generated nucleotide sequence identified as SEQ ID NO:X, and a predicted translated amino acid sequence identified as SEQ ID NO:Y, but also a sample of plasmid DNA containing cDNA Clone ID NO:Z (deposited with the ATCC on Oct. 5, 2000, and receiving ATCC designation numbers PTA 2574 and PTA 2575; deposited with the ATCC on Jan. 5, 2001, and having depositor reference numbers TS-1, TS-2, AC-1, and AC-2; and/or as set forth, for example, in Table 1A, 6 and 7). The nucleotide sequence of each deposited clone can readily be determined by sequencing the deposited clone in accordance with known methods. Further, techniques known in the art can be used to verify the nucleotide sequences of SEQ ID NO:X.

[0056] The predicted amino acid sequence can then be verified from such deposits. Moreover, the amino acid sequence of the protein encoded by a particular clone can also be directly determined by peptide sequencing or by expressing the protein in a suitable host cell containing the deposited human cDNA, collecting the protein, and determining its sequence.

[0057] RACE Protocol For Recovery of Full-Length Genes

[0058] Partial cDNA clones can be made full-length by utilizing the rapid amplification of cDNA ends (RACE) procedure described in Frohman, M. A., et al., Proc. Nat'l. Acad. Sci. USA, 85:8998-9002 (1988). A cDNA clone missing either the 5′ or 3′ end can be reconstructed to include the absent base pairs extending to the translational start or stop codon, respectively. In some cases, cDNAs are missing the start codon of translation, therefor. The following briefly describes a modification of this original 5′ RACE procedure. Poly A+ or total RNA is reverse transcribed with Superscript II (Gibco/BRL) and an antisense or complementary primer specific to the cDNA sequence. The primer is removed from the reaction with a Microcon Concentrator (Amicon). The first-strand cDNA is then tailed with dATP and terminal deoxynucleotide transferase (Gibco/BRL). Thus, an anchor sequence is produced which is needed for PCR amplification. The second strand is synthesized from the dA-tail in PCR buffer, Taq DNA polymerase (Perkin-Elmer Cetus), an oligo-dT-primer containing three adjacent restriction sites (XhoI, SalI and ClaI) at the 5′ end and a primer containing just these restriction sites. This double-stranded cDNA is PCR amplified for 40 cycles with the same primers as well as a nested cDNA-specific antisense primer. The PCR products are size-separated on an ethidium bromide-agarose gel and the region of gel containing cDNA products the predicted size of missing protein-coding DNA is removed. cDNA is purified from the agarose with the Magic PCR Prep kit (Promega), restriction digested with XhoI or SalI, and ligated to a plasmid such as pBluescript SKII (Stratagene) at XhoI and EcoRV sites. This DNA is transformed into bacteria and the plasmid clones sequenced to identify the correct protein-coding inserts. Correct 5′ ends are confirmed by comparing this sequence with the putatively identified homologue and overlap with the partial cDNA clone. Similar methods known in the art and/or commercial kits are used to amplify and recover 3′ ends.

[0059] Several quality-controlled kits are commercially available for purchase. Similar reagents and methods to those above are supplied in kit form from Gibco/BRL for both 5′ and 3′ RACE for recovery of full length genes. A second kit is available from Clontech which is a modification of a related technique, SLIC (single-stranded ligation to single-stranded cDNA), developed by Dumas et al., Nucleic Acids Res., 19:5227-32 (1991). The major differences in procedure are that the RNA is alkaline hydrolyzed after reverse transcription and RNA ligase is used to join a restriction site-containing anchor primer to the first-strand cDNA. This obviates the necessity for the dA-tailing reaction which results in a polyT stretch that is difficult to sequence past.

[0060] An alternative to generating 5′ or 3′ cDNA from RNA is to use cDNA library double-stranded DNA. An asymmetric PCR-amplified antisense cDNA strand is synthesized with an antisense cDNA-specific primer and a plasmid-anchored primer. These primers are removed and a symmetric PCR reaction is performed with a nested cDNA-specific antisense primer and the plasmid-anchored primer.

[0061] RNA Ligase Protocol For Generating The 5′ or 3′ End Sequences To Obtain Full Length Genes

[0062] Once a gene of interest is identified, several methods are available for the identification of the 5′ or 3′ portions of the gene which may not be present in the original cDNA plasmid. These methods include, but are not limited to, filter probing, clone enrichment using specific probes and protocols similar and identical to 5′ and 3′ RACE. While the full length gene may be present in the library and can be identified by probing, a useful method for generating the 5′ or 3′ end is to use the existing sequence information from the original cDNA to generate the missing information. A method similar to 5′ RACE is available for generating the missing 5′ end of a desired full-length gene. (This method was published by Fromont-Racine et al., Nucleic Acids Res., 21(7):1683-1684 (1993)). Briefly, a specific RNA oligonucleotide is ligated to the 5′ ends of a population of RNA presumably containing full-length gene RNA transcript and a primer set containing a primer specific to the ligated RNA oligonucleotide and a primer specific to a known sequence of the gene of interest, is used to PCR amplify the 5′ portion of the desired full length gene which may then be sequenced and used to generate the full length gene. This method starts with total RNA isolated from the desired source, poly A RNA may be used but is not a prerequisite for this procedure. The RNA preparation may then be treated with phosphatase if necessary to eliminate 5′ phosphate groups on degraded or damaged RNA which may interfere with the later RNA ligase step. The phosphatase if used is then inactivated and the RNA is treated with tobacco acid pyrophosphatase in order to remove the cap structure present at the 5′ ends of messenger RNAs. This reaction leaves a 5′ phosphate group at the 5′ end of the cap cleaved RNA which can then be ligated to an RNA oligonucleotide using T4 RNA ligase. This modified RNA preparation can then be used as a template for first strand cDNA synthesis using a gene specific oligonucleotide. The first strand synthesis reaction can then be used as a template for PCR amplification of the desired 5′ end using a primer specific to the ligated RNA oligonucleotide and a primer specific to the known sequence of the gene of interest. The resultant product is then sequenced and analyzed to confirm that the 5′ end sequence belongs to the relevant gene.

[0063] The present invention also relates to vectors or plasmids which include such DNA sequences, as well as the use of the DNA sequences. The material deposited with the ATCC (deposited with the ATCC on Oct. 5, 2000, and receiving ATCC designation numbers PTA 2574 and PTA 2575; deposited with the ATCC on Jan. 5, 2001, and receiving ATCC designation numbers TS-1, TS-2, AC-1, and AC-2; and/or as set forth, for example, in Table 1A, Table 6, or Table 7) is a mixture of cDNA clones derived from a variety of human tissue and cloned in either a plasmid vector or a phage vector, as described, for example, in Table 7. These deposits are referred to as “the deposits” herein. The tissues from which some of the clones were derived are listed in Table 7, and the vector in which the corresponding cDNA is contained is also indicated in Table 7. The deposited material includes cDNA clones corresponding to SEQ ID NO:X described, for example, in Table 1A (Clone ID NO:Z). A clone which is isolatable from the ATCC Deposits by use of a sequence listed as SEQ ID NO:X, may include the entire coding region of a human gene or in other cases such clone may include a substantial portion of the coding region of a human gene. Furthermore, although the sequence listing may in some instances list only a portion of the DNA sequence in a clone included in the ATCC Deposits, it is well within the ability of one skilled in the art to sequence the DNA included in a clone contained in the ATCC Deposits by use of a sequence (or portion thereof) described in, for example Tables 1A or 2 by procedures hereinafter further described, and others apparent to those skilled in the art.

[0064] Also provided in Table 7 is the name of the vector which contains the cDNA clone. Each vector is routinely used in the art. The following additional information is provided for convenience.

[0065] Vectors Lambda Zap (U.S. Pat. Nos. 5,128,256 and 5,286,636), Uni-Zap XR (U.S. Pat. Nos. 5,128, 256 and 5,286,636), Zap Express (U.S. Pat. Nos. 5,128,256 and 5,286,636), pbluescript (pBS) (Short, J. M. et al., Nucleic Acids Res. 16:7583-7600 (1988); Alting-Mees, M. A. and Short, J. M., Nucleic Acids Res. 17:9494 (1989)) and pBK (Alting-Mees, M. A. et al., Strategies 5.58-61 (1992)) are commercially available from Stratagene Cloning Systems, Inc., 11011 N. Torrey Pines Road, La Jolla, Calif., 92037. pBS contains an ampicillin resistance gene and pBK contains a neomycin resistance gene. Phagemid pBS may be excised from the Lambda Zap and Uni-Zap XR vectors, and phagemid pBK may be excised from the Zap Express vector. Both phagemids may be transformed into E. coli strain XL-1 Blue, also available from Stratagene.

[0066] Vectors pSport1, pCMVSport 1.0, pCMVSport 2.0 and pCMVSport 3.0, were obtained from Life Technologies, Inc., P. O. Box 6009, Gaithersburg, Md. 20897. All Sport vectors contain an ampicillin resistance gene and may be transformed into E. coli strain DHIOB, also available from Life Technologies. See, for instance, Gruber, C. E., et al., Focus 15.59-(1993). Vector lafmid BA (Bento Soares, Columbia University, New York, N.Y.) contains an ampicillin resistance gene and can be transformed into E. coli strain XL-1 Blue. Vector pCR®2.1, which is available from Invitrogen, 1600 Faraday Avenue, Carlsbad, Calif. 92008, contains an ampicillin resistance gene and may be transformed into E. coli strain DH10B, available from Life Technologies. See, for instance, Clark, J. M., Nuc. Acids Res. 16:9677-9686 (1988) and Mead, D. et al., Bio/Technology 9: (1991).

[0067] The present invention also relates to the genes corresponding to SEQ ID NO:X, SEQ ID NO:Y, and/or the deposited clone (Clone ID NO:Z). The corresponding gene can be isolated in accordance with known methods using the sequence information disclosed herein. Such methods include preparing probes or primers from the disclosed sequence and identifying or amplifying the corresponding gene from appropriate sources of genomic material.

[0068] Also provided in the present invention are allelic variants, orthologs, and/or species homologs. Procedures known in the art can be used to obtain full-length genes, allelic variants, splice variants, full-length coding portions, orthologs, and/or species homologs of genes corresponding to SEQ ID NO:X or the complement thereof, polypeptides encoded by genes corresponding to SEQ ID NO:X or the complement thereof, and/or the cDNA contained in Clone ID NO:Z, using information from the sequences disclosed herein or the clones deposited with the ATCC. For example, allelic variants and/or species homologs may be isolated and identified by making suitable probes or primers from the sequences provided herein and screening a suitable nucleic acid source for allelic variants and/or the desired homologue.

[0069] The polypeptides of the invention can be prepared in any suitable manner. Such polypeptides include isolated naturally occurring polypeptides, recombinantly produced polypeptides, synthetically produced polypeptides, or polypeptides produced by a combination of these methods. Means for preparing such polypeptides are well understood in the art.

[0070] The polypeptides may be in the form of the secreted protein, including the mature form, or may be a part of a larger protein, such as a fusion protein (see below). It is often advantageous to include an additional amino acid sequence which contains secretory or leader sequences, pro-sequences, sequences which aid in purification, such as multiple histidine residues, or an additional sequence for stability during recombinant production.

[0071] The polypeptides of the present invention are preferably provided in an isolated form, and preferably are substantially purified. A recombinantly produced version of a polypeptide, including the secreted polypeptide, can be substantially purified using techniques described herein or otherwise known in the art, such as, for example, by the one-step method described in Smith and Johnson, Gene 67:31-40 (1988). Polypeptides of the invention also can be purified from natural, synthetic or recombinant sources using techniques described herein or otherwise known in the art, such as, for example, antibodies of the invention raised against the polypeptides of the present invention in methods which are well known in the art.

[0072] The present invention provides a polynucleotide comprising, or alternatively consisting of, the nucleic acid sequence of SEQ ID NO:X, and/or the cDNA sequence contained in Clone ID NO:Z. The present invention also provides polypeptide comprising, or alternatively, consisting of, the polypeptide sequence of SEQ ID NO:Y, a polypeptide encoded by SEQ ID NO:X or a complement thereof, a polypeptide encoded by the cDNA contained in Clone ID NO:Z, and/or the polypeptide sequence encoded by a nucleotide sequence in SEQ ID NO:B as defined in column 6 of Table 1B. Polynucleotides encoding a polypeptide comprising, or alternatively consisting of the polypeptide sequence of SEQ ID NO:Y, a polypeptide encoded by SEQ ID NO:X, a polypeptide encoded by the cDNA contained in Clone ID NO:Z, and/or a polypeptide sequence encoded by a nucleotide sequence in SEQ ID NO:B as defined in column 6 of Table 1B are also encompassed by the invention. The present invention further encompasses a polynucleotide comprising, or alternatively consisting of, the complement of the nucleic acid sequence of SEQ ID NO:X, a nucleic acid sequence encoding a polypeptide encoded by the complement of the nucleic acid sequence of SEQ ID NO:X, and/or the cDNA contained in Clone ID NO:Z.

[0073] Moreover, representative examples of polynucleotides of the invention comprise, or alternatively consist of, one, two, three, four, five, six, seven, eight, nine, ten, or more of the sequences delineated in Table 1B column 6, or any combination thereof. Additional, representative examples of polynucleotides of the invention comprise, or alternatively consist of, one, two, three, four, five, six, seven, eight, nine, ten, or more of the complementary strand(s) of the sequences delineated in Table 1B column 6, or any combination thereof. In further embodiments, the above-described polynucleotides of the invention comprise, or alternatively consist of, sequences delineated in Table 1B, column 6, and have a nucleic acid sequence which is different from that of the BAC fragment having the sequence disclosed in SEQ ID NO:B (see Table 1B, column 5). In additional embodiments, the above-described polynucleotides of the invention comprise, or alternatively consist of, sequences delineated in Table 1B, column 6, and have a nucleic acid sequence which is different from that published for the BAC clone identified as BAC ID NO:A (see Table 1B, column 4). In additional embodiments, the above-described polynucleotides of the invention comprise, or alternatively consist of, sequences delineated in Table 1B, column 6, and have a nucleic acid sequence which is different from that contained in the BAC clone identified as BAC ID NO:A (see Table 1B, column 4). Polypeptides encoded by these polynucleotides, other polynucleotides that encode these polypeptides, and antibodies that bind these polypeptides are also encompassed by the invention. Additionally, fragments and variants of the above-described polynucleotides and polypeptides are also encompassed by the invention.

[0074] Further, representative examples of polynucleotides of the invention comprise, or alternatively consist of, one, two, three, four, five, six, seven, eight, nine, ten, or more of the sequences delineated in column 6 of Table 1B which correspond to the same Clone ID NO:Z (see Table 1B, column 1), or any combination thereof. Additional, representative examples of polynucleotides of the invention comprise, or alternatively consist of, one, two, three, four, five, six, seven, eight, nine, ten, or more of the complementary strand(s) of the sequences delineated in column 6 of Table 1B which correspond to the same Clone ID NO:Z (see Table 1B, column 1), or any combination thereof. In further embodiments, the above-described polynucleotides of the invention comprise, or alternatively consist of, sequences delineated in column 6 of Table 1B which correspond to the same Clone ID NO:Z (see Table 1B, column 1) and have a nucleic acid sequence which is different from that of the BAC fragment having the sequence disclosed in SEQ ID NO:B (see Table 1B, column 5). In additional embodiments, the above-described polynucleotides of the invention comprise, or alternatively consist of, sequences delineated in column 6 of Table 1B which correspond to the same Clone ID NO:Z (see Table 1B, column 1) and have a nucleic acid sequence which is different from that published for the BAC clone identified as BAC ID NO:A (see Table 1B, column 4). In additional embodiments, the above-described polynucleotides of the invention comprise, or alternatively consist of, sequences delineated in column 6 of Table 1B which correspond to the same Clone ID NO:Z (see Table 1B, column 1) and have a nucleic acid sequence which is different from that contained in the BAC clone identified as BAC ID NO:A (see Table 1B, column 4). Polypeptides encoded by these polynucleotides, other polynucleotides that encode these polypeptides, and antibodies that bind these polypeptides are also encompassed by the invention. Additionally, fragments and variants of the above-described polynucleotides and polypeptides are also encompassed by the invention.

[0075] Further, representative examples of polynucleotides of the invention comprise, or alternatively consist of, one, two, three, four, five, six, seven, eight, nine, ten, or more of the sequences delineated in column 6 of Table 1B which correspond to the same contig sequence identifer SEQ ID NO:X (see Table 1B, column 2), or any combination thereof. Additional, representative examples of polynucleotides of the invention comprise, or alternatively consist of, one, two, three, four, five, six, seven, eight, nine, ten, or more of the complementary strand(s) of the sequences delineated in column 6 of Table 1B which correspond to the same contig sequence identifer SEQ ID NO:X (see Table 1B, column 2), or any combination thereof. In further embodiments, the above-described polynucleotides of the invention comprise, or alternatively consist of, sequences delineated in column 6 of Table 1B which correspond to the same contig sequence identifer SEQ ID NO:X (see Table 1B, column 2) and have a nucleic acid sequence which is different from that of the BAC fragment having the sequence disclosed in SEQ ID NO:B (see Table 1B, column 5). In additional embodiments, the above-described polynucleotides of the invention comprise, or alternatively consist of, sequences delineated in column 6 of Table 1B which correspond to the same contig sequence identifer SEQ ID NO:X (see Table 1B, column 2) and have a nucleic acid sequence which is different from that published for the BAC clone identified as BAC ID NO:A (see Table 1B, column 4). In additional embodiments, the above-described polynucleotides of the invention comprise, or alternatively consist of, sequences delineated in column 6 of Table 1B which correspond to-the same contig sequence identifer SEQ ID NO:X (see Table 1B, column 2) and have a nucleic acid sequence which is different from that contained in the BAC clone identified as BAC ID NO:A (See Table 1B, column 4). Polypeptides encoded by these polynucleotides, other polynucleotides that encode these polypeptides, and antibodies that bind these polypeptides are also encompassed by the invention. Additionally, fragments and variants of the above-described polynucleotides and polypeptides are also encompassed by the invention.

[0076] Moreover, representative examples of polynucleotides of the invention comprise, or alternatively consist of, one, two, three, four, five, six, seven, eight, nine, ten, or more of the sequences delineated in the same row of Table 1B column 6, or any combination thereof. Additional, representative examples of polynucleotides of the invention comprise, or alternatively consist of, one, two, three, four, five, six, seven, eight, nine, ten, or more of the complementary strand(s) of the sequences delineated in the same row of Table 1B column 6, or any combination thereof. In preferred embodiments, the polynucleotides of the invention comprise, or alternatively consist of, one, two, three, four, five, six, seven, eight, nine, ten, or more of the complementary strand(s) of the sequences delineated in the same row of Table 1B column 6, wherein sequentially delineated sequences in the table (i.e. corresponding to those exons located closest to each other) are directly contiguous in a 5′ to 3′ orientation. In further embodiments, above-described polynucleotides of the invention comprise, or alternatively consist of, sequences delineated in the same row of Table 1B, column 6, and have a nucleic acid sequence which is different from that of the BAC fragment having the sequence disclosed in SEQ ID NO:B (see Table 1B, column 5). In additional embodiments, the above-described polynucleotides of the invention comprise, or alternatively consist of, sequences delineated in the same row of Table 1B, column 6, and have a nucleic acid sequence which is different from that published for the BAC clone identified as BAC ID NO:A (see Table 1B, column 4). In additional embodiments, the above-described polynucleotides of the invention comprise, or alternatively consist of, sequences delineated in the same row of Table 1B, column 6, and have a nucleic acid sequence which is different from that contained in the BAC clone identified as BAC ID NO:A (see Table 1B, column 4). Polypeptides encoded by these polynucleotides, other polynucleotides that encode these polypeptides, and antibodies that bind these polypeptides are also encompassed by the invention.

[0077] In additional specific embodiments, polynucleotides of the invention comprise, or alternatively consist of, one, two, three, four, five, six, seven, eight, nine, ten, or more of the sequences delineated in column 6 of Table 1B, and the polynucleotide sequence of SEQ ID NO:X (e.g., as defined in Table 1B, column 2) or fragments or variants thereof. Polypeptides encoded by these polynucleotides, other polynucleotides that encode these polypeptides, and antibodies that bind these polypeptides are also encompassed by the invention.

[0078] In additional specific embodiments, polynucleotides of the invention comprise, or alternatively consist of, one, two, three, four, five, six, seven, eight, nine, ten, or more of the sequences delineated in column 6 of Table 1B which correspond to the same Clone ID NO:Z (see Table 1B, column 1), and the polynucleotide sequence of SEQ ID NO:X (e.g., as defined in Table 1A or 1B) or fragments or variants thereof. In preferred embodiments, the delineated sequence(s) and polynucleotide sequence of SEQ ID NO:X correspond to the same Clone ID NO:Z. Polypeptides encoded by these polynucleotides, other polynucleotides that encode these polypeptides, and antibodies that bind these polypeptides are also encompassed by the invention.

[0079] In further specific embodiments, polynucleotides of the invention comprise, or alternatively consist of, one, two, three, four, five, six, seven, eight, nine, ten, or more of the sequences delineated in the same row of column 6 of Table 1B, and the polynucleotide sequence of SEQ ID NO:X (e.g., as defined in Table 1A or 1B) or fragments or variants thereof. In preferred embodiments, the delineated sequence(s) and polynucleotide sequence of SEQ ID NO:X correspond to the same row of column 6 of Table 1B. Polypeptides encoded by these polynucleotides, other polynucleotides that encode these polypeptides, and antibodies that bind these polypeptides are also encompassed by the invention.

[0080] In additional specific embodiments, polynucleotides of the invention comprise, or alternatively consist of a polynucleotide sequence in which the 3′ 10 polynucleotides of one of the sequences delineated in column 6 of Table 1B and the 5′ 10 polynucleotides of the sequence of SEQ ID NO:X are directly contiguous. Nucleic acids which hybridize to the complement of these 20 contiguous polynucleotides under stringent hybridization conditions or alternatively, under lower stringency conditions, are also encompassed by the invention. Polypeptides encoded by these polynucleotides and/or nucleic acids, other polynucleotides and/or nucleic acids that encode these polypeptides, and antibodies that bind these polypeptides are also encompassed by the invention. Additionally, fragments and variants of the above-described polynucleotides, nucleic acids, and polypeptides are also encompassed by the invention.

[0081] In additional specific embodiments, polynucleotides of the invention comprise, or alternatively consist of, a polynucleotide sequence in which the 3′ 10 polynucleotides of one of the sequences delineated in column 6 of Table 1B and the 5′ 10 polynucleotides of a fragment or variant of the sequence of SEQ ID NO:X are directly contiguous Nucleic acids which hybridize to the complement of these 20 contiguous polynucleotides under stringent hybridization conditions or alternatively, under lower stringency conditions, are also encompassed by the invention. Polypeptides encoded by these polynucleotides and/or nucleic acids, other polynucleotides and/or nucleic acids encoding these polypeptides, and antibodies that bind these polypeptides are also encompassed by the invention. Additionally, fragments and variants of the above-described polynucleotides, nucleic acids, and polypeptides are also encompassed by the invention.

[0082] In specific embodiments, polynucleotides of the invention comprise, or alternatively consist of, a polynucleotide sequence in which the 3′ 10 polynucleotides of the sequence of SEQ ID NO:X and the 5′ 10 polynucleotides of the sequence of one of the sequences delineated in column 6 of Table 1B are directly contiguous. Nucleic acids which hybridize to the complement of these 20 contiguous polynucleotides under stringent hybridization conditions or alternatively, under lower stringency conditions, are also encompassed by the invention. Polypeptides encoded by these polynucleotides and/or nucleic acids, other polynucleotides and/or nucleic acids encoding these polypeptides, and antibodies that bind these polypeptides are also encompassed by the invention. Additionally, fragments and variants of the above-described polynucleotides, nucleic acids, and polypeptides are also encompassed by the invention.

[0083] In specific embodiments, polynucleotides of the invention comprise, or alternatively consist of, a polynucleotide sequence in which the 3′ 10 polynucleotides of a fragment or variant of the sequence of SEQ ID NO:X and the 5′ 10 polynucleotides of the sequence of one of the sequences delineated in column 6 of Table 1B are directly contiguous. Nucleic acids which hybridize to the complement of these 20 contiguous polynucleotides under stringent hybridization conditions or alternatively, under lower stringency conditions, are also encompassed by the invention. Polypeptides encoded by these polynucleotides and/or nucleic acids, other polynucleotides and/or nucleic acids encoding these polypeptides, and antibodies that bind these polypeptides are also encompassed by the invention. Additionally, fragments and variants of the above-described polynucleotides, nucleic acids, and polypeptides, are also encompassed by the invention.

[0084] In further specific embodiments, polynucleotides of the invention comprise, or alternatively consist of, a polynucleotide sequence in which the 3′ 10 polynucleotides of one of the sequences delineated in column 6 of Table 1B and the 5′ 10 polynucleotides of another sequence in column 6 are directly contiguous. Nucleic acids which hybridize to the complement of these 20 contiguous polynucleotides under stringent hybridization conditions or alternatively, under lower stringency conditions, are also encompassed by the invention. Polypeptides encoded by these polynucleotides and/or nucleic acids, other polynucleotides and/or nucleic acids encoding these polypeptides, and antibodies that bind these polypeptides are also encompassed by the invention. Additionally, fragments and variants of the above-described polynucleotides, nucleic acids, and polypeptides are also encompassed by the invention.

[0085] In specific embodiments, polynucleotides of the invention comprise, or alternatively consist of, a polynucleotide sequence in which the 3′ 10 polynucleotides of one of the sequences delineated in column 6 of Table 1B and the 5′ 10 polynucleotides of another sequence in column 6 corresponding to the same Clone ID NO:Z (see Table 1B, column 1) are directly contiguous. Nucleic acids which hybridize to the complement of these 20 lower stringency conditions, are also encompassed by the invention. Polypeptides encoded by these polynucleotides and/or nucleic acids, other polynucleotides and/or nucleic acids encoding these polypeptides, and antibodies that bind these polypeptides are also encompassed by the invention. Additionally, fragments and variants of the above-described polynucleotides, nucleic acids, and polypeptides are also encompassed by the invention.

[0086] In specific embodiments, polynucleotides of the invention comprise, or alternatively consist of, a polynucleotide sequence in which the 3′ 10 polynucleotides of one sequence in column 6 corresponding to the same contig sequence identifer SEQ ID NO:X (see Table 1B, column 2) are directly contiguous. Nucleic acids which hybridize to the complement of these 20 contiguous polynucleotides under stringent hybridization conditions or alternatively, under lower stringency conditions, are also encompassed by the invention. Polypeptides encoded by these polynucleotides and/or nucleic acids, other polynucleotides and/or nucleic acids encoding these polypeptides, and antibodies that bind these polypeptides are also encompassed by the invention. Additionally, fragments and variants of the above-described polynucleotides, nucleic acids, and polypeptides are also encompassed by the invention.

[0087] In specific embodiments, polynucleotides of the invention comprise, or alternatively consist of a polynucleotide sequence in which the 3′ 10 polynucleotides of one of the sequences delineated in column 6 of Table 1B and the 5′ 10 polynucleotides of another sequence in column 6 corresponding to the same row are directly contiguous. In preferred embodiments, the 3′ 10 polynucleotides of one of the sequences delineated in column 6 of Table 1B is directly contiguous with the 5′ 10 polynucleotides of the next sequential exon delineated in Table 1B, column 6. Nucleic acids which hybridize to the complement of these 20 contiguous polynucleotides under stringent hybridization conditions or alternatively, under lower stringency conditions, are also encompassed by the invention. Polypeptides encoded by these polynucleotides and/or nucleic acids, other polynucleotides and/or nucleic acids encoding these polypeptides, and antibodies that bind these polypeptides are also encompassed by the invention. Additionally, fragments and variants of the above-described polynucleotides, nucleic acids, and polypeptides are also encompassed by the invention.

[0088] Many polynucleotide sequences, such as EST sequences, are publicly available and accessible through sequence databases and may have been publicly available prior to conception of the present invention. Preferably, such related polynucleotides are specifically excluded from the scope of the present invention. Accordingly, for each contig sequence (SEQ ID NO:X) listed in the fourth column of Table 1A, preferably excluded are one or more polynucleotides comprising a nucleotide sequence described by the general formula of a-b, where a is any integer between 1 and the final nucleotide minus 15 of SEQ ID NO:X, b is an integer of 15 to the final nucleotide of SEQ ID NO:X, where both a and b correspond to the positions of nucleotide residues shown in SEQ ID NO:X, and where b is greater than or equal to a +14. More specifically, preferably excluded are one or more polynucleotides comprising a nucleotide sequence described by the general formula of a-b, where a and b are integers as defined in columns 4 and 5, respectively, of Table 3. In specific embodiments, the polynucleotides of the invention do not consist of at least one, two, three, four, five, ten, or more of the specific polynucleotide sequences referenced by the Genbank Accession No. as disclosed in column 6 of Table 3 (including for example, published sequence in connection with a particular BAC clone). In further embodiments, preferably excluded from the invention are the specific polynucleotide sequence(s) contained in the clones corresponding to at least one, two, three, four, five, ten, or more of the available material having the accession numbers identified in the sixth column of this Table (including for example, the actual sequence contained in an identified BAC clone). In no way is this listing meant to encompass all of the sequences which may be excluded by the general formula, it is just a representative example. All references available through these accessions are hereby incorporated by reference in their entirety.

TABLE 3

| Clone ID | SEQ ID | Contig | EST Disclaimer | | |
|---|---|---|---|---|---|
| NO: Z | NO: X | ID: | Range of a | Range of b | Accession #'s |

| | | | | | |
|---|---|---|---|---|---|
| HAHD140 | 11 | 710790 | 1-642 | 15-656 | AI979303, AI627654, AI762005, AI627344, |
| | | | | | AI308065, AW138446, AI636384, W67420, |
| | | | | | AI825690, AW025834, AI190111, AI921024, |
| | | | | | W67304, AW082705, AW204142, and |
| | | | | | AF086254. |
| HDPTW90 | 12 | 722699 | 1-565 | 15-579 | AC017113, AL109804, AL109804, AL109804, |
| | | | | | and AL109911. |
| HDPXL24 | 13 | 1227222 | 1-3566 | 15-3580 | |
| HDTBW62 | 14 | 681324 | 1-443 | 15-457 | R49246, AW237401, AI969698, AI950812, |
| | | | | | AI571939, AI569994, AA506012, AI332421, |
| | | | | | AW131361, AA218990, AW104061, |
| | | | | | AA938113, AA470145, AI709076, |
| | | | | | AW149266, AI869822, AI553704, AA741222, |
| | | | | | AW392488, AW392477, AI970981, and |
| | | | | | AW392476. |
| HE2KL28 | 15 | 1124892 | 1-1040 | 15-1054 | |
| HE8BQ58 | 16 | 1127528 | 1-712 | 15-726 | |
| HHATR09 | 17 | 1129468 | 1-1069 | 15-1083 | |
| HYABP53 | 18 | 1027455 | 1-1311 | 15-1325 | |
| HHFML49 | 19 | 963278 | 1-1999 | 15-2013 | |
| HNTAR65 | 20 | 971373 | 1-1670 | 15-1684 | |
| HAGAS06 | 21 | 1048042 | 1-1393 | 15-1407 | |
| HS2SH04 | 22 | 1129140 | 1-1493 | 15-1507 | |
| HAHFI44 | 23 | 1135445 | 1-2218 | 15-2232 | |
| HAPPY24 | 24 | 1136291 | 1-1661 | 15-1675 | |
| HBCBF11 | 25 | 1204344 | 1-1928 | 15-1942 | |
| HBJHS02 | 26 | 948293 | 1-529 | 15-543 | AW402242, AW402801, N29316, AW383418, |
| | | | | | AW383426, AW383396, N35519, AW383428, |
| | | | | | N30453, W02963, AW403946, AW403434, |
| | | | | | AW407871, W02298, N46511, W03476, |
| | | | | | N20533, N29315, AA837208, AW402824, |
| | | | | | N28949, and AW402928. |
| HRDFA94 | 27 | 577352 | 1-724 | 15-738 | |
| HNTCU89 | 28 | 975097 | 1-1718 | 15-1732 | |
| HAPNO50 | 29 | 941934 | 1-1117 | 15-1131 | |
| HKACI15 | 30 | 892363 | 1-1798 | 15-1812 | AI241578, AI955238, AI312113, AW338261, |
| | | | | | AI979207, AI925871, AI333843, AW009598, |
| | | | | | AA741250, T86963, AI590808, AW190875, |
| | | | | | AA244018, N20044, AA101562, AA149993, |
| | | | | | AW192453, AA152150, N28398, AA483522, |
| | | | | | T40695, AI093487, AA224590, AI263270, |
| | | | | | AA244075, R72982, AA101561, T87045, |
| | | | | | AI193265, R01692, AI469580, AI632044, |
| | | | | | T84017, W76302, AI002582, R28222, |
| | | | | | R02633, AA101520, AI864718, T39606, |
| | | | | | AA304161, AA702259, AI608881, R27969, |
| | | | | | C75490, T39607, T84016, C75621, |
| | | | | | AA861308, AA890390, AA486163, |
| | | | | | AA486100, AA513370, AA404390, |
| | | | | | AA227408, AA641435, T73746, AI687737, |
| | | | | | AA215609, AI890283, AA642887, F31670, |
| | | | | | AA101519, AI799264, C17760, H57108, |
| | | | | | AA768079, AW085811, AI304788, AI935684, |
| | | | | | AI934664, AI815425, AW339937, |
| | | | | | AW277240, AF207907, AF111713, |
| | | | | | AF154005, AF172398, A91699, A91701, |
| | | | | | AF111714, AC005527, AC005529, |
| | | | | | AC002073, AC005519, AF207550, L81576, |
| | | | | | AC008498, AL035445, AL031311, |
| | | | | | AC005914, U63721, AC007421, AP000692, |
| | | | | | AC005358, AC005730, AJ246003, Z95116, |
| | | | | | AL031681, AF109907, AL020997, AC005696, |
| | | | | | AC000353, AC007637, AC004913, |
| | | | | | AL139054, AC002310, AC002991, |
| | | | | | AC004953, AL049795, AC005412, |
| | | | | | AC000025, AC007263, AC005575, |
| | | | | | AC002036, AC007390, AL121658, |
| | | | | | AC007536, Z68756, AP000512, AL109963, |
| | | | | | AC003086, and AF015416. |
| HMSNC17 | 31 | 1207838 | 1-4033 | 15-4047 | |
| HOFMP09 | 32 | 943358 | 1-545 | 15-559 | |
| HSXBF22 | 33 | 952744 | 1-1626 | 15-1640 | AI973128, AI459802, AI370911, AI370927, |
| | | | | | AI423465, AW207527, AI873583, R88039, |
| | | | | | R86664, AI356884, AW015789, AI460086, |
| | | | | | N46716, A1886914, and H43809. |
| HWLHY05 | 34 | 901894 | 1-1004 | 15-1018 | AC024065. |
| HHFME38 | 35 | 947970 | 1-629 | 15-643 | AC004616, AC011307, AC011307, |
| | | | | | AC004616, AC011302, and AC011302. |
| HHSGV13 | 36 | 943090 | 1-777 | 15-791 | Z45247, F08485, T31138, R52319, AA363868, |
| | | | | | H49742, AA333764, D59275, D80166, |
| | | | | | D51423, D80195, D58283, D59859, D80227, |
| | | | | | D80038, D80253, D59619, D80210, D51799, |
| | | | | | D80391, D80240, D80269, D80212, D80193, |
| | | | | | D80196, D80188, D80219, D59889, D81030, |
| | | | | | D59927, D80043, D80366, D80022, C14429, |
| | | | | | D50979, D80045, D80378, D59502, D57483, |
| | | | | | D80024, T03269, D50995, D59610, C75259, |
| | | | | | D80164, C14014, D59787, D80241, C15076, |
| | | | | | D80134, F13647, D81026, C14389, D51060, |
| | | | | | D51250, C14331, D59467, D80268, D58253, |
| | | | | | AW178893, D80949, AA305409, D80168, |
| | | | | | C14227, D81111, D51079, AW177440, |
| | | | | | AA305578, D51022, AW179328, D80522, |
| | | | | | AI910186, AW178775, D59695, AW378532, |
| | | | | | AA285331, AW352158, AW377671, |
| | | | | | AA514188, AW369651, D52291, Z21582, |
| | | | | | AI905856, D80251, D51097, D80248, |
| | | | | | AW178762, AW177501, AW177511, |
| | | | | | AW360834, C14298, D80064, AA514186, |
| | | | | | D80133, AW360811, AW352117, C14407, |
| | | | | | C05695, AW176467, AW378540, AW375405, |
| | | | | | D80132, AW366296, AW360844, AW360817, |
| | | | | | AW375406, AW378534, AI557751, D80014, |
| | | | | | AW179332, AW377672, AW179023, |
| | | | | | AW178905, AW179220, T11417, D80302, |
| | | | | | T02974, AW177505, D51103, AW352171, |
| | | | | | D80439, AW377676, AW178906, AW352170, |
| | | | | | AW177731, AW178907, AW179019, |
| | | | | | AW179024, D59373, D80247, AW179020, |
| | | | | | AW360841, AW178909, AW177456, |
| | | | | | AW179329, AW178980, AW177733, |
| | | | | | AW378528, AW178908, AW178754, |
| | | | | | AW179018, AW352174, T03116, AW179004, |
| | | | | | AW179012, AW178914, AW378525, D51213, |
| | | | | | D80157, AW367967, C06015, AW177722, |
| | | | | | AW177728, AW179009, D51759, D80258, |
| | | | | | AW178774, AW178911, AW378543, |
| | | | | | AW352163, AW378539, D58246, D59503, |
| | | | | | AW178983, AW352120, AI557774, |
| | | | | | AW178781, T48593, D59627, D58101, |
| | | | | | D45260, AW177723, D59653, AW177508, |
| | | | | | AI535850, C14975, AW378533, AW367950, |
| | | | | | AA809122, H67854, C03092, AA033512, |
| | | | | | H67866, AI525923, D59317, AW177497, |
| | | | | | AW177734, AW178986, D45273, AI525917, |
| | | | | | C14973, C14344, AI535686, D51221, D59551, |
| | | | | | D59474, D60214, AI525920, D60010, |
| | | | | | AA514184, AI525227, D50981, C14957, |
| | | | | | AI525242, C14046, T03048, AI525235, |
| | | | | | AI525925, AI525215, AI525912, AW378542, |
| | | | | | AI535961, C16955, AI525222, C05763, |
| | | | | | AL050342, A84916, A62298, A62300, |
| | | | | | AJ132110, X67155, A78862, A67220, |
| | | | | | D89785, A25909, D26022, D34614, Y17188, |
| | | | | | AR018138, D88547, AR025207, X82626, |
| | | | | | AF058696, I82448, AR008278, X68127, |
| | | | | | AB028859, AB012117, A85396, AR066482, |
| | | | | | Y12724, A85477, A44171, I19525, A86792, |
| | | | | | U87250, X93549, A82595, AR060385, |
| | | | | | A94995, AB002449, AF135125, AR016808, |
| | | | | | AR008443, I50126, I50132, I50128, I50133, |
| | | | | | AR066488, AR016514, AR060138, A45456, |
| | | | | | A26615, AR052274, AR064240, Y09669, |
| | | | | | A43192, A43190, AR038669, AR066490, |
| | | | | | AR066487, I14842, A30438, I18367, |
| | | | | | AR054175, D88507, X64588, D50010, |
| | | | | | Y17187, AB033111, I79511, A63261, |
| | | | | | AR008277, AR008281, AR008408, |
| | | | | | AR062872, A70867, AR016691, AR016690, |
| | | | | | U46128, Z32749, D13509, A64136, A68321, |
| | | | | | AR060133, U87247, S69292, AB023656, |
| | | | | | U79457, AF123263, AR060382, Z82022, |
| | | | | | AR032065, X93535, and AR008382. |
| HLQBY46 | 37 | 1124369 | 1-1467 | 15-1481 | |
| HE8DY76 | 38 | 1152570 | 1-2287 | 15-2301 | |
| HMWDB84 | 39 | 1111014 | 1-2737 | 15-2751 | |
| HNECM88 | 40 | 974717 | 1-967 | 15-981 | AC018755, AC018755, and AC018755. |
| HOFNC80 | 41 | 835718 | 1-353 | 15-367 | |
| HE6GK65 | 42 | 1155065 | 1-2210 | 15-2224 | |
| HETGL74 | 43 | 947978 | 1-598 | 15-612 | R30743. |
| HETIY94 | 44 | 1097305 | 1-2345 | 15-2359 | |
| HETLT82 | 45 | 883273 | 1-640 | 15-654 | AW003206, AI563909, AI809945, AA424228, |
| | | | | | and AB014526. |
| HFIHF63 | 46 | 1136311 | 1-2078 | 15-2092 | |
| HNGEO79 | 47 | 1129426 | 1-1640 | 15-1654 | |
| HHFCI36 | 48 | 844285 | 1-337 | 15-351 | AA297665, AA298879, AL049946, |
| | | | | | AC004616, AC073582, AC073582, |
| | | | | | AC011307, AC011307, AC004616, |
| | | | | | AC011302, AC011302, and AC011302. |
| HHPDX35 | 49 | 1223118 | 1-2676 | 15-2690 | |
| HIBEV89 | 50 | 922757 | 1-1089 | 15-1103 | AA352026, D81625, AA457053, and |
| | | | | | AF137367. |
| HLDBL95 | 51 | 811269 | 1-431 | 15-445 | A1393057, AF134918, AL133215, AL133215, |
| | | | | | and AL133215. |
| HLDBM06 | 52 | 1189003 | 1-1405 | 15-1419 | |
| HLHDR39 | 53 | 523499 | 1-444 | 15-458 | AL354760, AL354760, and AL354760. |
| HLJDQ79 | 54 | 774667 | 1-685 | 15-699 | AI279001, AI309853, AI346808, AW262866, |
| | | | | | AA845409, AW269884, AW069609, |
| | | | | | AI222714, AI814396, AI090041, AI261831, |
| | | | | | AW026873, AI926707, AI189010, AA418804, |
| | | | | | AI923918, AI696996, AI355341, AI082019, |
| | | | | | AA682734, AA946929, AI276623, AI078444, |
| | | | | | W86206, AI283259, AA948662, W19270, |
| | | | | | AI198813, AA639042, AI026034, R60830, |
| | | | | | AI797428, AI800667, AA845895, AI797924, |
| | | | | | AA223983, AA876070, AI802422, AI268914, |
| | | | | | N75887, AI040868, AI033779, AW072253, |
| | | | | | AI080435, AA847577, AA972508, W19281, |
| | | | | | AI765686, AI499971, AA632071, N33524, |
| | | | | | W04633, N22110, H16580, AI738872, |
| | | | | | AW022940, AA628361, H88786, AA558544, |
| | | | | | AI079661, AA834982, AA580038, N50677, |
| | | | | | AA835537, AI375877, AA864215, H07082, |
| | | | | | W31728, AA709294, AA487933, AA487934, |
| | | | | | H13730, R45566, AI922644, H68554, H89004, |
| | | | | | AI244053, R49016, AI708537, AA247866, |
| | | | | | N74694, AI950614, AA526994, W25374, |
| | | | | | W25452, AA233297, AA418977, AI497736, |
| | | | | | AI468939, AI568881, AL079657, AL135561, |
| | | | | | AW081940, AW337878, and L26335. |
| HLWAV41 | 55 | 1156377 | 1-1723 | 15-1737 | |
| HFPEL47 | 56 | 943750 | 1-720 | 15-734 | AJ243874, and AL031575. |
| HHPTE06 | 57 | 1172242 | 1-4642 | 15-4656 | |
| HLMAC70 | 58 | 1125687 | 1-1480 | 15-1494 | |
| HLWFG82 | 59 | 929647 | 1-545 | 15-559 | AI802325, AI161267, AI885931, AA219338, |
| | | | | | AI660388, AW170791, AW410057, S56581, |
| | | | | | AC009955, AC009955, AC009955, |
| | | | | | AC040991, AC040991, and AC024009. |
| HSTBK14 | 60 | 887715 | 1-380 | 15-394 | AA380041. |
| HE8EI09 | 61 | 915042 | 1-480 | 15-494 | AI273624, AI339735, AA256928, AA029852, |
| | | | | | AA334196, AA255437, and AA028982. |
| HHAUD86 | 62 | 944835 | 1-564 | 15-578 | AI625881, AI887475, AI688562, AI146845, |
| | | | | | AI758930, AI796494, AI368115, AI401254, |
| | | | | | AI081463, AI910517, AA421770, AI217429, |
| | | | | | AI660724, AA037484, AI399916, AI129600, |
| | | | | | AI468412, AI122975, W92953, AA115144, |
| | | | | | AI751774, AI092399, AI263350, AI042566, |
| | | | | | AI184469, AI127154, AW273646, AA115367, |
| | | | | | AI244856, AA644176, AI016097, AI201332, |
| | | | | | AA736395, AW198068, AA037563, |
| | | | | | AL139287, and AL139287. |
| HNTRL43 | 63 | 1126541 | 1-1693 | 15-1707 | |
| HPIBQ37 | 64 | 884289 | 1-411 | 15-425 | AA101561, W76302, C17760, AA227408, |
| | | | | | AA215609, AA101519, AA626769, |
| | | | | | AA359412, T73746, AI927392, AF111713, |
| | | | | | A91701, A91699, AF207907, AF172398, |
| | | | | | AF154005, and AB017568. |
| HEEAR06 | 65 | 1126471 | 1-1006 | 15-1020 | |
| HETEY43 | 66 | 1228508 | 1-1651 | 15-1665 | |
| HBJJX53 | 67 | 1194288 | 1-588 | 15-602 | |
| HBZSH19 | 68 | 578224 | 1-433 | 15-447 | AI707851, AI752914, AI610625, AI269269, |
| | | | | | AW104357, AA720665, A1192616, |
| | | | | | AA223243, AA576582, AW009078, H48475, |
| | | | | | H16800, AA037054, AW078965, AI609258, |
| | | | | | AC073321, AC073321, and AC073321. |
| HCEII41 | 69 | 1160558 | 1-2310 | 15-2324 | |
| HCEMK49 | 70 | 948028 | 1-683 | 15-697 | AA323594, N28363, T04913, R21312, |
| | | | | | AI423098, X75887, Z28367, I44675, X87096, |
| | | | | | I44676, and AL365181. |
| HCGME42 | 71 | 768283 | 1-549 | 15-563 | |
| HDAAN31 | 72 | 1207184 | 1-1839 | 15-1853 | |
| HDPSJ02 | 73 | 943316 | 1-1272 | 15-1286 | AA366176, AL109804, AL109804, and |
| | | | | | AL109804. |
| HDTBO48 | 74 | 945083 | 1-505 | 15-519 | |
| HE8PB92 | 75 | 940805 | 1-536 | 15-550 | T68139, AP002414, AC021942, and |
| | | | | | AC021942. |
| HEGAR66 | 76 | 844291 | 1-570 | 15-584 | AA339802, W79688, and R48751. |
| HWAEU35 | 77 | 1199101 | 1-1111 | 15-1125 | |
| HWBCQ57 | 78 | 1222194 | 1-1006 | 15-1020 | |
| HEGAO83 | 79 | 780837 | 1-314 | 15-328 | AR064011, AC024009, AC040991, and |
| | | | | | AC040991. |

[0089] TABLE 4

| Code | Description | Tissue | Organ | Cell Line | Disease | Vector |
|---|---|---|---|---|---|---|
| AR022 | a_Heart | a_Heart | | | | |
| AR023 | a_Liver | a_Liver | | | | |
| AR024 | a_mammary gland | a_mammary gland | | | | |
| AR025 | a_Prostate | a_Prostate | | | | |
| AR026 | a_small intestine | a_small intestine | | | | |
| AR027 | a_Stomach | a_Stomach | | | | |
| AR028 | Blood B cells | Blood B cells | | | | |
| AR029 | Blood B cells activated | Blood B cells | | | | |
| | | activated | | | | |
| AR030 | Blood B cells resting | Blood B cells | | | | |
| | | resting | | | | |
| AR031 | Blood T cells activated | Blood T cells | | | | |
| | | activated | | | | |
| AR032 | Blood T cells resting | Blood T cells resting | | | | |
| AR033 | brain | brain | | | | |
| AR034 | breast | breast | | | | |
| AR035 | breast cancer | breast cancer | | | | |
| AR036 | Cell Line CAOV3 | Cell Line CAOV3 | | | | |
| AR037 | cell line PA-1 | cell line PA-1 | | | | |
| AR038 | cell line transformed | cell line transformed | | | | |
| AR039 | colon | colon | | | | |
| AR040 | colon (9808co65R) | colon (9808co65R) | | | | |
| AR041 | colon (9809co15) | colon (9809co15) | | | | |
| AR042 | colon cancer | colon cancer | | | | |
| AR043 | colon cancer (9808co64R) | colon cancer | | | | |
| | | (9808co64R) | | | | |
| AR044 | colon cancer 9809co14 | colon cancer | | | | |
| | | 9809co14 | | | | |
| AR045 | corn clone 5 | corn clone 5 | | | | |
| AR046 | corn clone 6 | corn clone 6 | | | | |
| AR047 | corn clone 2 | corn clone 2 | | | | |
| AR048 | corn clone 3 | corn clone 3 | | | | |
| AR049 | Corn Clone 4 | Corn Clone 4 | | | | |
| AR050 | Donor II B Cells 24 hrs | Donor II B Cells | | | | |
| | | 24 hrs | | | | |
| AR051 | Donor II B Cells 72 hrs | Donor II B Cells | | | | |
| | | 72 hrs | | | | |
| AR052 | Donor II B-Cells 24 hrs. | Donor II B-Cells 24 | | | | |
| | | hrs. | | | | |
| AR053 | Donor II B-Cells 72 hrs | Donor II B-Cells | | | | |
| | | 72 hrs | | | | |
| AR054 | Donor II Resting B Cells | Donor II Resting B | | | | |
| | | Cells | | | | |
| AR055 | Heart | Heart | | | | |
| AR056 | Human Lung (clonetech) | Human Lung | | | | |
| | | (clonetech) | | | | |
| AR057 | Human Mammary | Human Mammary | | | | |
| | (clontech) | (clontech) | | | | |
| AR058 | Human Thymus | Human Thymus | | | | |
| | (clonetech) | (clonetech) | | | | |
| AR059 | Jurkat (unstimulated) | Jurkat | | | | |
| | | (unstimulated) | | | | |
| AR060 | Kidney | Kidney | | | | |
| AR06l | Liver | Liver | | | | |
| AR062 | Liver (Clontech) | Liver (Clontech) | | | | |
| AR063 | Lymphocytes chronic | Lymphocytes | | | | |
| | lymphocytic leukaemia | chronic lymphocytic | | | | |
| | | leukaemia | | | | |
| AR064 | Lymphocytes diffuse large | Lymphocytes | | | | |
| | B cell lymphoma | diffuse large B cell | | | | |
| | | lymphoma | | | | |
| AR065 | Lymphocytes follicular | Lymphocytes | | | | |
| | lymphoma | follicular lymphoma | | | | |
| AR066 | normal breast | normal breast | | | | |
| AR067 | Normal Ovarian | Normal Ovarian | | | | |
| | (4004901) | (4004901) | | | | |
| AR068 | Normal Ovary 9508G045 | Normal Ovary | | | | |
| | | 9508G045 | | | | |
| AR069 | Normal Ovary 9701G208 | Normal Ovary | | | | |
| | | 9701G208 | | | | |
| AR070 | Normal Ovary 9806G005 | Normal Ovary | | | | |
| | | 9806G005 | | | | |
| AR071 | Ovarian Cancer | Ovarian Cancer | | | | |
| AR072 | Ovarian Cancer | Ovarian Cancer | | | | |
| | (9702G001) | (9702G001) | | | | |
| AR073 | Ovarian Cancer | Ovarian Cancer | | | | |
| | (9707G029) | (9707G029) | | | | |
| AR074 | Ovarian Cancer | Ovarian Cancer | | | | |
| | (9804G011) | (9804G011) | | | | |
| AR075 | Ovarian Cancer | Ovarian Cancer | | | | |
| | (9806G019) | (9806G019) | | | | |
| AR076 | Ovarian Cancer | Ovarian Cancer | | | | |
| | (9807G017) | (9807G017) | | | | |
| AR077 | Ovarian Cancer | Ovarian Cancer | | | | |
| | (9809G001) | (9809G001) | | | | |
| AR078 | ovarian cancer 15799 | ovarian cancer | | | | |
| | | 15799 | | | | |
| AR079 | Ovarian Cancer | Ovarian Cancer | | | | |
| | 17717AID | 17717AID | | | | |
| AR080 | Ovarian Cancer | Ovarian Cancer | | | | |
| | 4004664B1 | 4004664B1 | | | | |
| AR081 | Ovarian Cancer | Ovarian Cancer | | | | |
| | 4005315A1 | 4005315A1 | | | | |
| AR082 | ovarian cancer 94127303 | ovarian cancer | | | | |
| | | 94127303 | | | | |
| AR083 | Ovarian Cancer 96069304 | Ovarian Cancer | | | | |
| | | 96069304 | | | | |
| AR084 | Ovarian Cancer 9707G029 | Ovarian Cancer | | | | |
| | | 9707G029 | | | | |
| AR085 | Ovarian Cancer 9807G045 | Ovarian Cancer | | | | |
| | | 9807G045 | | | | |
| AR086 | ovarian cancer 9809G001 | ovarian cancer | | | | |
| | | 9809G001 | | | | |
| AR087 | Ovarian Cancer | Ovarian Cancer | | | | |
| | 9905C032RC | 9905C032RC | | | | |
| AR088 | Ovarian cancer 9907 C00 | Ovarian cancer 9907 | | | | |
| | 3rd | C00 3rd | | | | |
| AR089 | Prostate | Prostate | | | | |
| AR090 | Prostate (clonetech) | Prostate (clonetech) | | | | |
| AR091 | prostate cancer | prostate cancer | | | | |
| AR092 | prostate cancer #15176 | prostate cancer | | | | |
| | | #15176 | | | | |
| AR093 | prostate cancer #15509 | prostate cancer | | | | |
| | | #15509 | | | | |
| AR094 | prostate cancer #15673 | prostate cancer | | | | |
| | | #15673 | | | | |
| AR095 | Small Intestine (Clontech) | Small Intestine | | | | |
| | | (Clontech) | | | | |
| AR096 | Spleen | Spleen | | | | |
| AR097 | Thymus T cells activated | Thymus T cells | | | | |
| | | activated | | | | |
| AR098 | Thymus T cells resting | Thymus T cells | | | | |
| | | resting | | | | |
| AR099 | Tonsil | Tonsil | | | | |
| AR100 | Tonsil geminal center | Tonsil geminal | | | | |
| | centroblast | center centroblast | | | | |
| AR101 | Tonsil germinal center B | Tonsil germinal | | | | |
| | cell | center B cell | | | | |
| AR102 | Tonsil lymph node | Tonsil lymph node | | | | |
| AR103 | Tonsil memory B cell | Tonsil memory B | | | | |
| | | cell | | | | |
| AR104 | Whole Brain | Whole Brain | | | | |
| AR105 | Xenograft ES-2 | Xenograft ES-2 | | | | |
| AR106 | Xenograft SW626 | Xenograft SW626 | | | | |
| H0004 | Human Adult Spleen | Human Adult | Spleen | | | Uni-ZAP |
| | | Spleen | | | | XR |
| H0008 | Whole 6 Week Old | | | | | Uni-ZAP |
| | Embryo | | | | | XR |
| H0009 | Human Fetal Brain | | | | | Uni-ZAP |
| | | | | | | XR |
| H0012 | Human Fetal Kidney | Human Fetal Kidney | Kidney | | | Uni-ZAP |
| | | | | | | XR |
| H0013 | Human 8 Week Whole | Human 8 Week Old | Embryo | | | Uni-ZAP |
| | Embryo | Embryo | | | | XR |
| H0014 | Human Gall Bladder | Human Gall Bladder | Gall Bladder | | | Uni-ZAP |
| | | | | | | XR |
| H0015 | Human Gall Bladder, | Human Gall Bladder | Gall Bladder | | | Uni-ZAP |
| | fraction II | | | | | XR |
| H0021 | Human Infant Adrenal | Human Infant | Adrenal | | | Uni-ZAP |
| | Gland | Adrenal Gland | gland | | | XR |
| H0023 | Human Fetal Lung | | | | | Uni-ZAP |
| | | | | | | XR |
| H0024 | Human Fetal Lung III | Human Fetal Lung | Lung | | | Uni-ZAP |
| | | | | | | XR |
| H0028 | Human Old Ovary | Human Old Ovary | Ovary | | | pBluescript |
| H0030 | Human Placenta | | | | | Uni-ZAP |
| | | | | | | XR |
| H0031 | Human Placenta | Human Placenta | Placenta | | | Uni-ZAP |
| | | | | | | XR |
| H0032 | Human Prostate | Human Prostate | Prostate | | | Uni-ZAP |
| | | | | | | XR |
| H0036 | Human Adult-Small | Human Adult Small | Small Int. | | | Uni-ZAP |
| | Intestine | Intestine | | | | XR |
| H0038 | Human Testes | Human Testes | Testis | | | Uni-ZAP |
| | | | | | | XR |
| H0039 | Human Pancreas Tumor | Human Pancreas | Pancreas | | disease | Uni-ZAP |
| | | Tumor | | | | XR |
| H0040 | Human Testes Tumor | Human Testes | Testis | | disease | Uni-ZAP |
| | | Tumor | | | | XR |
| H0041 | Human Fetal Bone | Human Fetal Bone | Bone | | | Uni-ZAP |
| | | | | | | XR |
| H0042 | Human Adult Pulmonary | Human Adult | Lung | | | Uni-ZAP |
| | | Pulmonary | | | | XR |
| H0046 | Human Endometrial | Human Endometrial | Uterus | | disease | Uni-ZAP |
| | Tumor | Tumor | | | | XR |
| H0050 | Human Fetal Heart | Human Fetal Heart | Heart | | | Uni-ZAP |
| | | | | | | XR |
| H0051 | Human Hippocampus | Human | Brain | | | Uni-ZAP |
| | | Hippocampus | | | | XR |
| H0052 | Human Cerebellum | Human Cerebellum | Brain | | | Uni-ZAP |
| | | | | | | XR |
| H0056 | Human Umbilical Vein, | Human Umbilical | Umbilical | | | Uni-ZAP |
| | Endo, remake | Vein Endothelial | vein | | | XR |
| | | Cells | | | | |
| H0057 | Human Fetal Spleen | | | | | Uni-ZAP |
| | | | | | | XR |
| H0059 | Human Uterine Cancer | Human Uterine | Uterus | | disease | Lambda |
| | | Cancer | | | | ZAP II |
| H0060 | Human Macrophage | Human Macrophage | Blood | Cell Line | | pBluescript |
| H0063 | Human Thymus | Human Thymus | Thymus | | | Uni-ZAP |
| | | | | | | XR |
| H0068 | Human Skin Tumor | Human Skin Tumor | Skin | | disease | Uni-ZAP |
| | | | | | | XR |
| H0069 | Human Activated T-Cells | Activated T-Cells | Blood | Cell Line | | Uni-ZAP |
| | | | | | | XR |
| H0081 | Human Fetal Epithelium | Human Fetal Skin | Skin | | | Uni-ZAP |
| | (Skin) | | | | | XR |
| H0083 | HUMAN JURKAT | Jurkat Cells | | | | Uni-ZAP |
| | MEMBRANE BOUND | | | | | XR |
| | POLYSOMES | | | | | |
| H0086 | Human epithelioid | Epithelioid | Sk Muscle | | disease | Uni-ZAP |
| | sarcoma | Sarcoma, muscle | | | | XR |
| H0087 | Human Thymus | Human Thymus | | | | pBluescript |
| H0090 | Human T-Cell Lymphoma | T-Cell Lymphoma | T-Cell | | disease | Uni-ZAP |
| | | | | | | XR |
| H0100 | Human Whole Six Week | Human Whole Six | Embryo | | | Uni-ZAP |
| | Old Embryo | Week Old Embryo | | | | XR |
| H0102 | Human Whole 6 Week | Human Whole Six | Embryo | | | pBluescript |
| | Old Embryo (II), subt | Week Old Embryo | | | | |
| H0103 | Human Fetal Brain, | Human Fetal Brain | Brain | | | Uni-ZAP |
| | subtracted | | | | | XR |
| H0105 | Human Fetal Heart, | Human Fetal Heart | Heart | | | pBluescript |
| | subtracted | | | | | |
| H0109 | Human Macrophage, | Macrophage | Blood | Cell Line | | pBluescript |
| | subtracted | | | | | |
| H0111 | Human Placenta, | Human Placenta | Placenta | | | pBluescript |
| | subtracted | | | | | |
| H0116 | Human Thymus Tumor, | Human Thymus | Thymus | | | pBluescript |
| | subtracted | Tumor | | | | |
| H0123 | Human Fetal Dura Mater | Human Fetal Dura | Brain | | | Uni-ZAP |
| | | Mater | | | | XR |
| H0124 | Human | Human | Sk Muscle | | disease | Uni-ZAP |
| | Rhabdomyosarcoma | Rhabdomyosarcoma | | | | XR |
| H0125 | Cem cells cyclohexamide | Cyclohexamide | Blood | Cell Line | | Uni-ZAP |
| | treated | Treated Cem, Jurkat, | | | | XR |
| | | Raji, and Supt | | | | |
| H0132 | LNCAP + 30 nM R1881 | LNCAP Cell Line | Prostate | Cell Line | | Uni-ZAP |
| | | | | | | XR |
| H0134 | Raji Cells, cyclohexamide | Cyclohexamide | Blood | Cell Line | | Uni-ZAP |
| | treated | Treated Cem, Jurkat, | | | | XR |
| | | Raji, and Supt | | | | |
| H0135 | Human Synovial Sarcoma | Human Synovial | Synovium | | | Uni-ZAP |
| | | Sarcoma | | | | XR |
| H0136 | Supt Cells, cyclohexamide | Cyclohexamide | Blood | Cell Line | | Uni-ZAP |
| | treated | Treated Cem, Jurkat, | | | | XR |
| | | Raji, and Supt | | | | |
| H0144 | Nine Week Old Early | 9 Wk Old Early | Embryo | | | Uni-ZAP |
| | Stage Human | Stage Human | | | | XR |
| H0150 | Human Epididymus | Epididymis | Testis | | | Uni-ZAP |
| | | | | | | XR |
| H0156 | Human Adrenal Gland | Human Adrenal | Adrenal | | disease | Uni-ZAP |
| | Tumor | Gland Tumor | Gland | | | XR |
| H0163 | Human Synovium | Human Synovium | Synovium | | | Uni-ZAP |
| | | | | | | XR |
| H0169 | Human Prostate Cancer, | Human Prostate | Prostate | | disease | Uni-ZAP |
| | Stage C fraction | Cancer, stage C | | | | XR |
| H0170 | 12 Week Old Early Stage | Twelve Week Old | Embryo | | | Uni-ZAP |
| | Human | Early Stage Human | | | | XR |
| H0171 | 12 Week Old Early Stage | Twelve Week Old | Embryo | | | Uni-ZAP |
| | Human, II | Early Stage Human | | | | XR |
| H0172 | Human Fetal Brain, | Human Fetal Brain | Brain | | | Lambda |
| | random primed | | | | | ZAP II |
| H0179 | Human Neutrophil | Human Neutrophil | Blood | Cell Line | | Uni-ZAP |
| | | | | | | XR |
| H0181 | Human Primary Breast | Human Primary | Breast | | disease | Uni-ZAP |
| | Cancer | Breast Cancer | | | | XR |
| H0187 | Resting T-Cell | T-Cells | Blood | Cell Line | | Lambda |
| | | | | | | ZAP II |
| H0194 | Human Cerebellum, | Human Cerebellum | Brain | | | pBluescript |
| | subtracted | | | | | |
| H0204 | Human Colon Cancer, | Human Colon | Colon | | | pBluescript |
| | subtracted | Cancer | | | | |
| H0208 | Early Stage Human Lung, | Human Fetal Lung | Lung | | | pBluescript |
| | subtracted | | | | | |
| H0220 | Activated T-Cells, 4 hrs, | Activated T-Cells | Blood | Cell Line | | Uni-ZAP |
| | subtracted | | | | | XR |
| H0224 | Activated T-Cells, 12 hrs, | Activated T-Cells | Blood | Cell Line | | Uni-ZAP |
| | subtracted | | | | | XR |
| H0239 | Human Kidney Tumor | Human Kidney | Kidney | | disease | Uni-ZAP |
| | | Tumor | | | | XR |
| H0242 | Human Fetal Heart, | Human Fetal Heart | Heart | | | pBluescript |
| | Differential (Fetal- | | | | | |
| | Specific) | | | | | |
| H0244 | Human 8 Week Whole | Human 8 Week Old | Embryo | | | Uni -ZAP |
| | Embryo, subtracted | Embryo | | | | XR |
| H0250 | Human Activated | Human Monocytes | | | | Uni-ZAP |
| | Monocytes | | | | | XR |
| H0251 | Human Chondrosarcoma | Human | Cartilage | | disease | Uni-ZAP |
| | | Chondrosarcoma | | | | XR |
| H0252 | Human Osteosarcoma | Human | Bone | | disease | Uni-ZAP |
| | | Osteosarcoma | | | | XR |
| H0253 | Human adult testis, large | Human Adult Testis | Testis | | | Uni-ZAP |
| | inserts | | | | | XR |
| H0254 | Breast Lymph node cDNA | Breast Lymph Node | Lymph Node | | | Uni-ZAP |
| | library | | | | | XR |
| H0255 | breast lymph node CDNA | Breast Lymph Node | Lymph Node | | | Lambda |
| | library | | | | | ZAP II |
| H0263 | human colon cancer | Human Colon | Colon | | disease | Lambda |
| | | Cancer | | | | ZAP II |
| H0264 | human tonsils | Human Tonsil | Tonsil | | | Uni-ZAP |
| | | | | | | XR |
| H0265 | Activated T-Cell | T-Cells | Blood | Cell Line | | Uni-ZAP |
| | (12 hs)/Thiouridine | | | | | XR |
| | labelledEco | | | | | |
| H0266 | Human Microvascular | HMEC | Vein | Cell Line | | Lambda |
| | Endothelial Cells, fract. A | | | | | ZAP II |
| H0268 | Human Umbilical Vein | HUVE Cells | Umbilical | Cell Line | | Lambda |
| | Endothelial Cells, fract. A | | vein | | | ZAP II |
| H0271 | Human Neutrophil, | Human Neutrophil | Blood | Cell Line | | Uni-ZAP |
| | Activated | Activated | | | | XR |
| H0272 | HUMAN TONSILS, | Human Tonsil | Tonsil | | | Uni-ZAP |
| | FRACTION 2 | | | | | XR |
| H0284 | Human OB MG63 control | Human | Bone | Cell Line | | Uni-ZAP |
| | fraction I | Osteoblastoma | | | | XR |
| | | MG63 cell line | | | | |
| H0292 | Human OB HOS treated | Human | Bone | Cell Line | | Uni-ZAP |
| | (10 nM E2) fraction 1 | Osteoblastoma HOS | | | | XR |
| | | cell line | | | | |
| H0294 | Amniotic Cells - TNF | Amniotic Cells - | Placenta | Cell Line | | Uni-ZAP |
| | induced | TNF induced | | | | XR |
| H0295 | Amniotic Cells - Primary | Amniotic Cells - | Placenta | Cell Line | | Uni-ZAP |
| | Culture | Primary Culture | | | | XR |
| H0306 | CD34 depleted Buffy Coat | CD34 Depleted | Cord Blood | | | ZAP Express |
| | (Cord Blood) | Buffy Coat (Cord | | | | |
| | | Blood) | | | | |
| H0309 | Human Chronic Synovitis | Synovium, Chronic | Synovium | | disease | Uni-ZAP |
| | | Synovitis/ | | | | XR |
| | | Osteoarthritis | | | | |
| H0316 | HUMAN STOMACH | Human Stomach | Stomach | | | Uni-ZAP |
| | | | | | | XR |
| H0318 | HUMAN B CELL | Human B Cell | Lymph Node | | disease | Uni-ZAP |
| | LYMPHOMA | Lymphoma | | | | XR |
| H0327 | human corpus colosum | Human Corpus | Brain | | | Uni-ZAP |
| | | Callosum | | | | XR |
| H0328 | human ovarian cancer | Ovarian Cancer | Ovary | | disease | Uni-ZAP |
| | | | | | | XR |
| H0331 | Hepatocellular Tumor | Hepatocellular | Liver | | disease | Lambda |
| | | Tumor | | | | ZAP II |
| H0333 | Hemangiopericytoma | Hemangiopericytoma | Blood vessel | | disease | Lambda |
| | | | | | | ZAP II |
| H0341 | Bone Marrow Cell Line | Bone Marrow Cell | Bone Marrow | Cell Line | | Uni-ZAP |
| | (RS4; 11) | Line RS4; 11 | | | | XR |
| H0351 | Glioblastoma | Glioblastoma | Brain | | disease | Uni-ZAP |
| | | | | | | XR |
| H0352 | wilm's tumor | Wilm's Tumor | | | disease | Uni-ZAP |
| | | | | | | XR |
| H0354 | Human Leukocytes | Human Leukocytes | Blood | Cell Line | | pCMVSport |
| | | | | | | 1 |
| H0355 | Human Liver | Human Liver, | | | | pCMVSport |
| | | normal Adult | | | | 1 |
| H0369 | H. Atrophic Endometrium | Atrophic | | | | Uni-ZAP |
| | | Endometrium and | | | | XR |
| | | myometrium | | | | |
| H0370 | H. Lymph node breast | Lymph node with | | | disease | Uni-ZAP |
| | Cancer | Met. Breast Cancer | | | | XR |
| H0373 | Human Heart | Human Adult Heart | Heart | | | pCMVSport |
| | | | | | | 1 |
| H0375 | Human Lung | Human Lung | | | | pCMVSport |
| | | | | | | 1 |
| H0376 | Human Spleen | Human Adult | Spleen | | | pCMVSport |
| | | Spleen | | | | 1 |
| H0379 | Human Tongue, frac 1 | Human Tongue | | | | pSport1 |
| H0381 | Bone Cancer | Bone Cancer | | | disease | Uni-ZAP |
| | | | | | | XR |
| H0390 | Human Amygdala | Human Amygdala | | | disease | pBluescript |
| | Depression, re-excision | Depression | | | | |
| H0391 | H. Meniingima, M6 | Human Meningima | brain | | | pSport1 |
| H0392 | H. Meningima, M1 | Human Meningima | brain | | | pSport1 |
| H0393 | Fetal Liver, subtraction II | Human Fetal Liver | Liver | | | pBluescript |
| H0396 | L1 Cell line | Redd-Sternberg cell | | | | ZAP Express |
| H0402 | CD34 depleted Buffy Coat | CD34 Depleted | Cord Blood | | | ZAP Express |
| | (Cord Blood), re-excision | Buffy Coat (Cord | | | | |
| | | Blood) | | | | |
| H0408 | Human kidney Cortex, | Human Kidney | | | | pBluescript |
| | subtracted | Cortex | | | | |
| H0411 | H Female Bladder, Adult | Human Female | Bladder | | | pSport1 |
| | | Adult Bladder | | | | |
| H0412 | Human umbilical vein | HUVE Cells | Umbilical | Cell Line | | pSport1 |
| | endothelial cells, IL-4 | | vein | | | |
| | induced | | | | | |
| H0413 | Human Umbilical Vein | HUVE Cells | Umbilical | Cell Line | | pSport1 |
| | Endothelial Cells, | | vein | | | |
| | uninduced | | | | | |
| H0415 | H. Ovarian Tumor, II, | Ovarian Tumor, | Ovary | | disease | pCMVSport |
| | OV5232 | OV5232 | | | | 2.0 |
| H0416 | Human Neutrophils, | Human Neutrophil | Blood | Cell Line | | pBluescript |
| | Activated, re-excision | Activated | | | | |
| H0421 | Human Bone Marrow, re- | Bone Marrow | | | | pBluescript |
| | excision | | | | | |
| H0422 | T-Cell PHA 16 hrs | T-Cells | Blood | Cell Line | | pSport1 |
| H0423 | T-Cell PHA 24 hrs | T-Cells | Blood | Cell Line | | pSport1 |
| H0427 | Human Adipose | Human Adipose, left | | | | pSport1 |
| | | hiplipoma | | | | |
| H0428 | Human Ovary | Human Ovary | Ovary | | | pSport1 |
| | | Tumor | | | | |
| H0429 | K562 + PMA (36 hrs), re- | K562 Cell line | cell line | Cell Line | | ZAP Express |
| | excision | | | | | |
| H0431 | H. Kidney Medulla, re- | Kidney medulla, | Kidney | | | pBluescript |
| | excision | | | | | |
| H0435 | Ovarian Tumor 10-3-95 | Ovarian Tumor, | Ovary | | | pCMVSport |
| | | OV350721 | | | | 2.0 |
| H0436 | Resting T-Cell Library, II | T-Cells | Blood | Cell Line | | pSport1 |
| H0439 | Human Eosinophils | Eosinophils | | | | pBluescript |
| H0445 | Spleen, Chronic | Human Spleen, CLL | Spleen | | disease | pSport1 |
| | lymphocytic leukemia | | | | | |
| H0449 | CD34+ cell, I | CD34 positive cells | | | | pSport1 |
| H0450 | CD34+ cells, II | CD34 positive cells | | | | pCMVSport |
| | | | | | | 2.0 |
| H0455 | H. Striatum Depression, | Human Brain, | Brain | | | pBluescript |
| | subt | Striatum Depression | | | | |
| H0457 | Human Eosinophils | Human Eosinophils | | | | pSport1 |
| H0458 | CD34+cell, I, frac II | CD34 positive cells | | | | pSport1 |
| H0459 | CD34+cells, II, | CD34 positive cells | | | | pCMVSport |
| | FRACTION 2 | | | | | 2.0 |
| H0477 | Human Tonsil, Lib 3 | Human Tonsil | Tonsil | | | pSport1 |
| H0478 | Salivary Gland, Lib 2 | Human Salivary | Salivary | | | pSport1 |
| | | Gland | gland | | | |
| H0485 | Hodgkin's Lymphoma I | Hodgkin's | | | disease | pCMVSport |
| | | Lymphoma I | | | | 2.0 |
| H0486 | Hodgkin's Lymphoma II | Hodgkin's | | | disease | pCMVSport |
| | | Lymphoma II | | | | 2.0 |
| H0488 | Human Tonsils, Lib 2 | Human Tonsils | | | | pCMVSport |
| | | | | | | 2.0 |
| H0489 | Crohn's Disease | Ileum | Intestine | | disease | pSport1 |
| H0492 | HL-60, RA 4h, Subtracted | HL-60 Cells, RA | Blood | Cell Line | | Uni-ZAP |
| | | stimulated for 4H | | | | XR |
| H0494 | Keratinocyte | Keratinocyte | | | | pCMVSport |
| | | | | | | 2.0 |
| H0497 | HEL cell line | HEL cell line | | HEL | | pSport1 |
| | | | | 92.1.7 | | |
| H0506 | Ulcerative Colitis | Colon | Colon | | | pSport1 |
| H0509 | Liver, Hepatoma | Human Liver, | Liver | | disease | pCMVSport |
| | | Hepatoma, patient 8 | | | | 3.0 |
| H0518 | pBMC stimulated w/ poly | pBMC stimulated | | | | pCMVSport |
| | I/C | with poly I/C | | | | 3.0 |
| H0519 | NTERA2, control | NTERA2, | | | | pCMVSport |
| | | Teratocarcinoma | | | | 3.0 |
| | | cell line | | | | |
| H0520 | NTERA2 +retinoic acid, | NTERA2, | | | | pSport1 |
| | 14 days | Teratocarcinoma | | | | |
| | | cell line | | | | |
| H0521 | Primary Dendritic Cells, | Primary Dendritic | | | | pCMVSport |
| | lib 1 | cells | | | | 3.0 |
| H0522 | Primary Dendritic | Primary Dendritic | | | | pCMVSport |
| | cells, frac 2 | cells | | | | 3.0 |
| H0525 | PCR, pBMC I/C treated | pBMC stimulated | | | | PCRII |
| | | with poly I/C | | | | |
| H0529 | Myoloid Progenitor Cell | TF-1 Cell Line; | | | | pCMV Sport |
| | Line | Myoloid progenitor | | | | 3.0 |
| | | cell line | | | | |
| H0530 | Human Dermal | Human Dermal | | | | pSport1 |
| | Endothelial | Endothelial Cells; | | | | |
| | Cells, untreated | untreated | | | | |
| H0538 | Merkel Cells | Merkel cells | Lymph node | | | pSport1 |
| H0539 | Pancreas Islet Cell Tumor | Pancreas Islet Cell | Pancreas | | disease | pSport1 |
| | | Tumour | | | | |
| H0542 | T Cell helper I | Helper T cell | | | | pCMVSport |
| | | | | | | 3.0 |
| H0543 | T cell helper II | Helper T cell | | | | pCMVSport |
| | | | | | | 3.0 |
| H0544 | Human endometrial | Human endometrial | | | | pCMVSport |
| | stromal cells | stromal cells | | | | 3.0 |
| H0545 | Human endometrial | Human endometrial | | | | pCMVSport |
| | stromal cells-treated with | stromal cells-treated | | | | 3.0 |
| | progesterone | with proge | | | | |
| H0547 | NTERA2 teratocarcinoma | NTERA2, | | | | pSport1 |
| | cell line + retinoic acid (14 | Teratocarcinoma | | | | |
| | days) | cell line | | | | |
| H0549 | H. Epididiymus, caput & | Human | | | | Uni-ZAP |
| | corpus | Epididiymus, caput | | | | XR |
| | | and corpus | | | | |
| H0550 | H. Epididiymus, cauda | Human | | | | Uni-ZAP |
| | | Epididiymus, cauda | | | | XR |
| H0551 | Human Thymus Stromal | Human Thymus | | | | pCMVSport |
| | Cells | Stromal Cells | | | | 3.0 |
| H0553 | Human Placenta | Human Placenta | | | | pCMVSport |
| | | | | | | 3.0 |
| H0555 | Rejected Kidney, lib 4 | Human Rejected | Kidney | | disease | pCMVSport |
| | | Kidney | | | | 3.0 |
| H0556 | Activated T- | T-Cells | Blood | Cell Line | | Uni-ZAP |
| | cell(12 h)/Thiouridine-re- | | | | | XR |
| | excision | | | | | |
| H0559 | HL-60, PMA 4H, re- | HL-60 Cells, PMA | Blood | Cell Line | | Uni-ZAP |
| | excision | stimulated 4H | | | | XR |
| H0560 | KMH2 | KMH2 | | | | pCMVSport |
| | | | | | | 3.0 |
| H0561 | L428 | L428 | | | | pCMVSport |
| | | | | | | 3.0 |
| H0563 | Human Fetal Brain, | Human Fetal Brain | | | | pCMVSport |
| | normalized 50021F | | | | | 2.0 |
| H0566 | Human Fetal | Human Fetal Brain | | | | pCMVSport |
| | Brain, normalized c50F | | | | | 2.0 |
| H0567 | Human Fetal Brain, | Human Fetal Brain | | | | pCMV Sport |
| | normalized A5002F | | | | | 2.0 |
| H0572 | Human Fetal Brain, | Human Fetal Brain | | | | pCMVSport |
| | normalized AC5002 | | | | | 2.0 |
| H0574 | Hepatocellular Tumor; re- | Hepatocellular | Liver | | disease | Lambda |
| | excision | Tumor | | | | ZAP II |
| H0575 | Human Adult | Human Adult | Lung | | | Uni-ZAP |
| | Pulmonary; re-excision | Pulmonary | | | | XR |
| H0576 | Resting T-Cell; re- | T-Cells | Blood | Cell Line | | Lambda |
| | excision | | | | | ZAP II |
| H0579 | Pericardium | Pericardium | Heart | | | pSport1 |
| H0580 | Dendritic cells, pooled | Pooled dendritic | | | | pCMVSport |
| | | cells | | | | 3.0 |
| H0581 | Human Bone Marrow, | Human Bone | Bone Marrow | | | pCMVSport |
| | treated | Marrow | | | | 3.0 |
| H0583 | B Cell lymphoma | B Cell Lymphoma | B Cell | | disease | pCMVSport |
| | | | | | | 3.0 |
| H0586 | Healing groin wound, 6.5 | healing groin | groin | | disease | pCMVSport |
| | hours post incision | wound, 6.5 hours | | | | 3.0 |
| | | post incision - 2/ | | | | |
| H0587 | Healing groin wound; 7.5 | Groin-2/19/97 | groin | | disease | pCMVSport |
| | hours post incision | | | | | 3.0 |
| H0589 | CD34 positive cells (cord | CD34 Positive Cells | Cord Blood | | | ZAP Express |
| | blood), re-ex | | | | | |
| H0590 | Human adult small | Human Adult Small | Small Int. | | | Uni-ZAP |
| | intestine, re-excision | Intestine | | | | XR |
| H0591 | Human T-cell | T-Cell Lymphoma | T-Cell | | disease | Uni-ZAP |
| | lymphoma; re-excision | | | | | XR |
| H0592 | Healing groin wound - | HGS wound healing | | | disease | pCMVSport |
| | zero hr post-incision | project; abdomen | | | | 3.0 |
| | (control) | | | | | |
| H0593 | Olfactory | Olfactory epithelium | | | | pCMVSport |
| | epithelium; nasalcavity | from roof of left | | | | 3.0 |
| | | nasal cacit | | | | |
| H0594 | Human Lung Cancer; re- | Human Lung Cancer | Lung | | disease | Lambda |
| | excision | | | | | ZAP II |
| H0595 | Stomach cancer | Stomach Cancer - | | | disease | Uni-ZAP |
| | (human); re-excision | 5383A (human) | | | | XR |
| H0596 | Human Colon Cancer; re- | Human Colon | Colon | | | Lambda |
| | excision | Cancer | | | | ZAP II |
| H0597 | Human Colon; re-excision | Human Colon | | | | Lambda |
| | | | | | | ZAP II |
| H0598 | Human Stomach; re- | Human Stomach | Stomach | | | Uni-ZAP |
| | excision | | | | | XR |
| H0599 | Human Adult Heart; re- | Human Adult Heart | Heart | | | Uni-ZAP |
| | excision | | | | | XR |
| H0600 | Healing Abdomen | Abdomen | | | disease | pCMV Sport |
| | wound; 70&90 min post | | | | | 3.0 |
| | incision | | | | | |
| H0601 | Healing Abdomen | Abdomen | | | disease | pCMVSport |
| | Wound; 15 days post | | | | | 3.0 |
| | incision | | | | | |
| H0604 | Human Pituitary, re- | Human Pituitary | | | | pBluescript |
| | excision | | | | | |
| H0606 | Human Primary Breast | Human Primary | Breast | | disease | Uni-ZAP |
| | Cancer; re-excision | Breast Cancer | | | | XR |
| H0611 | H. Leukocytes, | H. Leukocytes | | | | pCMVSport |
| | normalized cot 500 B | | | | | 1 |
| H0613 | H. Leukocytes, normalized | H. Leukocytes | | | | pCMVSport |
| | cot 5B | | | | | 1 |
| H0614 | H. Leukocytes, | H. Leukocytes | | | | pCMVSport |
| | normalized cot 500 A | | | | | 1 |
| H0615 | Human Ovarian Cancer | Ovarian Cancer | Ovary | | disease | Uni-ZAP |
| | Reexcision | | | | | XR |
| H0616 | Human Testes, Reexcision | Human Testes | Testis | | | Uni-ZAP |
| | | | | | | XR |
| H0617 | Human Primary Breast | Human Primary | Breast | | disease | Uni-ZAP |
| | Cancer Reexcision | Breast Cancer | | | | XR |
| H0618 | Human Adult Testes, | Human Adult Testis | Testis | | | Uni-ZAP |
| | Large Inserts, Reexcision | | | | | XR |
| H0619 | Fetal Heart | Human Fetal Heart | Heart | | | Uni-ZAP |
| | | | | | | XR |
| H0620 | Human Fetal Kidney; | Human Fetal Kidney | Kidney | | | Uni-ZAP |
| | Reexcision | | | | | XR |
| H0622 | Human Pancreas Tumor; | Human Pancreas | Pancreas | | disease | Uni-ZAP |
| | Reexcision | Tumor | | | | XR |
| H0623 | Human Umbilical Vein; | Human Umbilical | Umbilical | | | Uni-ZAP |
| | Reexcision | Vein Endothelial | vein | | | XR |
| | | Cells | | | | |
| H0624 | 12 Week Early Stage | Twelve Week Old | Embryo | | | Uni-ZAP |
| | Human II; Reexcision | Early Stage Human | | | | XR |
| H0625 | Ku 812F Basophils Line | Ku 812F Basophils | | | | pSport1 |
| H0627 | Saos2 Cells; Vitamin D3 | Saos2 Cell Line; | | | | pSport1 |
| | Treated | Vitamin D3 Treated | | | | |
| H0628 | Human Pre-Differentiated | Human Pre- | | | | Uni-ZAP |
| | Adipocytes | Differentiated | | | | XR |
| | | Adipocytes | | | | |
| H0629 | Human Leukocyte, control | Human Normalized | | | | pCMVSport |
| | #2 | leukocyte | | | | 1 |
| H0631 | Saos2, Dexamethosome | Saos2 Cell Line; | | | | pSport1 |
| | Treated | Dexamethosome | | | | |
| | | Treated | | | | |
| H0632 | Hepatocellular Tumor; re- | Hepatocellular | Liver | | | Lambda |
| | excision | Tumor | | | | ZAP II |
| H0633 | Lung Carcinoma A549 | TNFalpha activated | | | disease | pSport1 |
| | TNFalpha activated | A549-Lung | | | | |
| | | Carcinoma | | | | |
| H0634 | Human Testes Tumor, re- | Human Testes | Testis | | disease | Uni-ZAP |
| | excision | Tumor | | | | XR |
| H0635 | Human Activated T-Cells, | Activated T-Cells | Blood | Cell Line | | Uni-ZAP |
| | re-excision | | | | | XR |
| H0637 | Dendritic Cells From | Dentritic cells from | | | | pSport1 |
| | CD34 Cells | CD34 cells | | | | |
| H0638 | CD40 activated monocyte | CD40 activated | | | | pSport1 |
| | dendridic cells | monocyte dendridic | | | | |
| | | cells | | | | |
| H0641 | LPS activated derived | LPS activated | | | | pSport1 |
| | dendritic cells | monocyte derived | | | | |
| | | dendritic cells | | | | |
| H0644 | Human Placenta (re- | Human Placenta | Placenta | | | Uni-ZAP |
| | excision) | | | | | XR |
| H0646 | Lung, Cancer (4005313 | Metastatic | | | | pSport1 |
| | A3): Invasive Poorly | squamous cell lung | | | | |
| | Differentiated Lung | carcinoma, poorly di | | | | |
| | Adenocarcinoma, | | | | | |
| H0647 | Lung, Cancer (4005163 | Invasive poorly | | | disease | pSport1 |
| | B7): Invasive, Poorly Diff. | differentiated lung | | | | |
| | Adenocarcinoma, | adenocarcinoma | | | | |
| | Metastatic | | | | | |
| H0648 | Ovary, Cancer: (4004562 | Papillary Cstic | | | disease | pSport1 |
| | B6) Papillary Serous | neoplasm of low | | | | |
| | Cystic Neoplasm, Low | malignant potentia | | | | |
| | Malignant Pot | | | | | |
| H0649 | Lung, Normal: (4005313 | Normal Lung | | | | pSport1 |
| | B1) | | | | | |
| H0650 | B-Cells | B-Cells | | | | pCMVSport |
| | | | | | | 3.0 |
| H0651 | Ovary, Normal: | Normal Ovary | | | | pSport1 |
| | (9805C040R) | | | | | |
| H0652 | Lung, Normal: (4005313 | Normal Lung | | | | pSport1 |
| | B1) | | | | | |
| H0653 | Stromal Cells | Stromal Cells | | | | pSport1 |
| H0656 | B-cells (unstimulated) | B-cells | | | | pSport1 |
| | | (unstimulated) | | | | |
| H0657 | B-cells (stimulated) | B-cells (stimulated) | | | | pSport1 |
| H0658 | Ovary, Cancer | 9809C332-Poorly | Ovary & | | disease | pSport1 |
| | (9809C332): Poorly | differentiate | Fallopian | | | |
| | differentiated | | Tubes | | | |
| | adenocarcinoma | | | | | |
| H0659 | Ovary, Cancer | Grade II Papillary | Ovary | | disease | pSport1 |
| | (15395A1F): Grade II | Carcinoma, Ovary | | | | |
| | Papillary Carcinoma | | | | | |
| H0660 | Ovary, Cancer: | Poorly differentiated | | | disease | pSport1 |
| | (15799A1F) Poorly | carcinoma, ovary | | | | |
| | differentiated carcinoma | | | | | |
| H0661 | Breast, Cancer: (4004943 | Breast cancer | | | disease | pSport1 |
| | A5) | | | | | |
| H0662 | Breast, Normal: | Normal Breast - | Breast | | | pSport1 |
| | (4005522B2) | #4005522(B2) | | | | |
| H0663 | Breast, Cancer: (4005522 | Breast Cancer - | Breast | | disease | pSport1 |
| | A2) | #4005522(A2) | | | | |
| H0664 | Breast, Cancer: | Breast Cancer | Breast | | disease | pSport1 |
| | (9806C012R) | | | | | |
| H0667 | Stromal cells(HBM3.18) | Stromal cell(HBM | | | | pSport1 |
| | | 3.18) | | | | |
| H0668 | stromal cell clone 2.5 | stromal cell clone | | | | pSport1 |
| | | 2.5 | | | | |
| H0670 | Ovary, Cancer(4004650 | Ovarian Cancer - | | | | pSport1 |
| | A3): Well-Differentiated | 4004650A3 | | | | |
| | Micropapillary Serous | | | | | |
| | Carcinoma | | | | | |
| H0672 | Ovary, Cancer: (4004576 | Ovarian | Ovary | | | pSport1 |
| | A8) | Cancer(4004576A8) | | | | |
| H0673 | Human Prostate Cancer, | Human Prostate | Prostate | | | Uni-ZAP |
| | Stage B2; re-excision | Cancer, stage B2 | | | | XR |
| H0674 | Human Prostate Cancer, | Human Prostate | Prostate | | | Uni-ZAP |
| | Stage C; re-excission | Cancer, stage C | | | | XR |
| H0676 | Colon, Cancer: | Colon Cancer | | | | pCMVSport |
| | (9808C064R)-total RNA | 9808C064R | | | | 3.0 |
| H0677 | TNFR degenerate oligo | B-Cells | | | | PCRII |
| H0682 | Serous Papillary | serous papillary | | | | pCMVSport |
| | Adenocarcinoma | adenocarcinoma | | | | 3.0 |
| | | (9606G304SPA3B) | | | | |
| H0684 | Serous Papillary | Ovarian Cancer- | Ovaries | | | pCMVSport |
| | Adenocarcinoma | 9810G606 | | | | 3.0 |
| H0685 | Adenocarcinoma of | Adenocarcinoma of | | | | pCMVSport |
| | Ovary, Human Cell Line, | Ovary, Human Cell | | | | 3.0 |
| | #OVCAR-3 | Line, #OVCAR- | | | | |
| H0687 | Human normal | Human normal | Ovary | | | pCMVSport |
| | ovary(#9610G215) | ovary(#9610G215) | | | | 3.0 |
| H0688 | Human Ovarian | Human Ovarian | | | | pCMVSport |
| | Cancer(#9807G017) | cancer(#9807G017), | | | | 3.0 |
| | | mRNA from Maura | | | | |
| | | Ru | | | | |
| H0689 | Ovarian Cancer | Ovarian Cancer, | | | | pCMVSport |
| | | #9806G019 | | | | 3.0 |
| H0690 | Ovarian Cancer, # | Ovarian Cancer, | | | | pCMVSport |
| | 9702G001 | #9702G001 | | | | 3.0 |
| H0692 | BLyS Receptor from | B Cell Lymphoma | B Cell | | | pCMVSport |
| | Expression Cloning | | | | | 3.0 |
| H0694 | Prostate gland | Prostate gland, | prostate | | | pCMVSport |
| | adenocarcinoma | adenocarcinoma, | gland | | | 3.0 |
| | | mod/diff, gleason | | | | |
| N0006 | Human Fetal Brain | Human Fetal Brain | | | | |
| S0001 | Brain frontal cortex | Brain frontal cortex | Brain | | | Lambda |
| | | | | | | ZAP II |
| S0002 | Monocyte activated | Monocyte-activated | blood | Cell Line | | Uni-ZAP |
| | | | | | | XR |
| S0003 | Human Osteoclastoma | Osteoclastoma | bone | | disease | Uni-ZAP |
| | | | | | | XR |
| S0007 | Early Stage Human Brain | Human Fetal Brain | | | | Uni-ZAP |
| | | | | | | XR |
| S0010 | Human Amygdala | Amygdala | | | | Uni-ZAP |
| | | | | | | XR |
| S0011 | STROMAL - | Osteoclastoma | bone | | disease | Uni-ZAP |
| | OSTEOCLASTOMA | | | | | XR |
| S0013 | Prostate | Prostate | prostate | | | Uni-ZAP |
| | | | | | | XR |
| S0022 | Human Osteoclastoma | Osteoclastoma | | | | Uni-ZAP |
| | Stromal Cells - | Stromal Cells | | | | XR |
| | unamplified | | | | | |
| S0026 | Stromal cell TF274 | stromal cell | Bone marrow | Cell Line | | Uni-ZAP |
| | | | | | | XR |
| S0027 | Smooth muscle, serum | Smooth muscle | Pulmanary | Cell Line | | Uni-ZAP |
| | treated | | artery | | | XR |
| S0028 | Smooth muscle, control | Smooth muscle | Pulmanary | Cell Line | | Uni-ZAP |
| | | | artery | | | XR |
| S0030 | Brain pons | Brain Pons | Brain | | | Uni-ZAP |
| | | | | | | XR |
| S0031 | Spinal cord | Spinal cord | spinal cord | | | Uni-ZAP |
| | | | | | | XR |
| S0036 | Human Substantia Nigra | Human Substantia | | | | Uni-ZAP |
| | | Nigra | | | | XR |
| S0038 | Human Whole Brain #2 - | Human Whole Brain | | | | ZAP Express |
| | Oligo dT > 1.5 Kb | #2 | | | | |
| S0039 | Hypothalamus | Hypothalamus | Brain | | | Uni-ZAP |
| | | | | | | XR |
| S0040 | Adipocytes | Human Adipocytes | | | | Uni-ZAP |
| | | from Osteoclastoma | | | | XR |
| S0042 | Testes | Human Testes | | | | ZAP Express |
| S0044 | Prostate BPH | prostate BPH | Prostate | | disease | Uni-ZAP |
| | | | | | | XR |
| S0045 | Endothelial cells-control | Endothelial cell | endothelial | Cell Line | | Uni-ZAP |
| | | | cell-lung | | | XR |
| S0046 | Endothelial-induced | Endothelial cell | endothelial | Cell Line | | Uni-ZAP |
| | | | cell-lung | | | XR |
| S0048 | Human Hypothalamus, | Human | | | disease | Uni-ZAP |
| | Alzheimer's | Hypothalamus, | | | | XR |
| | | Alzheimer's | | | | |
| S0049 | Human Brain, Striatum | Human Brain, | | | | Uni-ZAP |
| | | Striatum | | | | XR |
| S0050 | Human Frontal Cortex, | Human Frontal | | | disease | Uni-ZAP |
| | Schizophrenia | Cortex, | | | | XR |
| | | Schizophrenia | | | | |
| S0051 | Human | Human | | | disease | Uni-ZAP |
| | Hypothalmus, Schizophren | Hypothalamus, | | | | XR |
| | ia | Schizophrenia | | | | |
| S0052 | neutrophils control | human neutrophils | blood | Cell Line | | Uni-ZAP |
| | | | | | | XR |
| S0053 | Neutrophils IL-1 and LPS | human neutrophil | blood | Cell Line | | Uni-ZAP |
| | induced | induced | | | | XR |
| S0106 | STRIATUM | | BRAIN | | disease | Uni-ZAP |
| | DEPRESSION | | | | | XR |
| S0112 | Hypothalamus | | Brain | | | Uni-ZAP |
| | | | | | | XR |
| S0114 | Anergic T-cell | Anergic T-cell | | Cell Line | | Uni-ZAP |
| | | | | | | XR |
| S0116 | Bone marrow | Bone marrow | Bone marrow | | | Uni-ZAP |
| | | | | | | XR |
| S0126 | Osteoblasts | Osteoblasts | Knee | Cell Line | | Uni-ZAP |
| | | | | | | XR |
| S0132 | Epithelial-TNFa and INF | Airway Epithelial | | | | Uni-ZAP |
| | induced | | | | | XR |
| S0134 | Apoptotic T-cell | apoptotic cells | | Cell Line | | Uni-ZAP |
| | | | | | | XR |
| S0142 | Macrophage-oxLDL | macrophage- | blood | Cell Line | | Uni-ZAP |
| | | oxidized LDL | | | | XR |
| | | treated | | | | |
| S0144 | Macrophage (GM-CSF | Macrophage (GM- | | | | Uni-ZAP |
| | treated) | CSF treated) | | | | XR |
| S0146 | prostate-edited | prostate BPH | Prostate | | | Uni-ZAP |
| | | | | | | XR |
| S0148 | Normal Prostate | Prostate | prostate | | | Uni-ZAP |
| | | | | | | XR |
| S0150 | LNCAP prostate cell line | LNCAP Cell Line | Prostate | Cell Line | | Uni-ZAP |
| | | | | | | XR |
| S0152 | PC3 Prostate cell line | PC3 prostate cell | | | | Uni-ZAP |
| | | line | | | | XR |
| S0190 | Prostate BPH, Lib 2, | Human Prostate | | | | pSport1 |
| | subtracted | BPH | | | | |
| S0192 | Synovial Fibroblasts | Synovial Fibroblasts | | | | pSport1 |
| | (control) | | | | | |
| S0194 | Synovial hypoxia | Synovial Fibroblasts | | | | pSport1 |
| S0196 | Synovial IL-1/TNF | Synovial Fibroblasts | | | | pSport1 |
| | stimulated | | | | | |
| S0206 | Smooth Muscle- HASTE | Smooth muscle | Pulmanary | Cell Line | | pBluescript |
| | normalized | | artery | | | |
| S0210 | Messangial cell, frac 2 | Messangial cell | | | | pSport1 |
| S0212 | Bone Marrow Stromal | Bone Marrow | | | | pSport1 |
| | Cell, untreated | Stromal | | | | |
| | | Cell, untreated | | | | |
| S0214 | Human Osteoclastoma, re- | Osteoclastoma | bone | | disease | Uni-ZAP |
| | excision | | | | | XR |
| S0216 | Neutrophils IL-1 and LPS | human neutrophil | blood | Cell Line | | Uni-ZAP |
| | induced | induced | | | | XR |
| S0218 | Apoptotic T-cell, re- | apoptotic cells | | Cell Line | | Uni-ZAP |
| | excision | | | | | XR |
| S0222 | H. Frontal | H. Brain, Frontal | Brain | | disease | Uni-ZAP |
| | cortex, epileptic; re- | Cortex, Epileptic | | | | XR |
| | excision | | | | | |
| S0242 | Synovial Fibroblasts | Synovial Fibroblasts | | | | pSport1 |
| | (II1/TNF), subt | | | | | |
| S0250 | Human Osteoblasts II | Human Osteoblasts | Femur | | disease | pCMVSport |
| | | | | | | 2.0 |
| S0260 | Spinal Cord, re-excision | Spinal cord | spinal cord | | | Uni-ZAP |
| | | | | | | XR |
| S0276 | Synovial hypoxia-RSF | Synovial fobroblasts | Synovial | | | pSport1 |
| | subtracted | (rheumatoid) | tissue | | | |
| S0278 | H Macrophage (GM-CSF | Macrophage (GM- | | | | Uni-ZAP |
| | treated), re-excision | CSF treated) | | | | XR |
| S0280 | Human Adipose Tissue, | Human Adipose | | | | Uni-ZAP |
| | re-excision | Tissue | | | | XR |
| S0282 | Brain Frontal Cortex, re- | Brain frontal cortex | Brain | | | Lambda |
| | excision | | | | | ZAP II |
| S0292 | Osteoarthritis (OA-4) | Human | Bone | | disease | pSport1 |
| | | Osteoarthritic | | | | |
| | | Cartilage | | | | |
| S0300 | Frontal lobe, dementia; re- | Frontal Lobe | Brain | | | Uni-ZAP |
| | excision | dementia/Alzheimer's | | | | XR |
| S0308 | Spleen/normal | Spleen normal | | | | pSport1 |
| S0310 | Normal trachea | Normal trachea | | | | pSport1 |
| S0314 | Human | Human | | | disease | pSport1 |
| | osteoarthritis; fraction I | osteoarthritic | | | | |
| | | cartilage | | | | |
| S0328 | Palate carcinoma | Palate carcinoma | Uvula | | disease | pSport1 |
| S0330 | Palate normal | Palate normal | Uvula | | | pSport1 |
| S0344 | Macrophage-oxLDL; re- | macrophage- | blood | Cell Line | | Uni-ZAP |
| | excision | oxidized LDL | | | | XR |
| | | treated | | | | |
| S0346 | Human Amygdala; re- | Amygdala | | | | Uni-ZAP |
| | excision | | | | | XR |
| S0354 | Colon Normal II | Colon Normal | Colon | | | pSport1 |
| S0356 | Colon Carcinoma | Colon Carcinoma | Colon | | disease | pSport1 |
| S0358 | Colon Normal III | Colon Normal | Colon | | | pSport1 |
| S0360 | Colon Tumor II | Colon Tumor | Colon | | disease | pSport1 |
| S0362 | Human Gastrocnemius | Gastrocnemius | | | | pSport1 |
| | | muscle | | | | |
| S0364 | Human Quadriceps | Quadriceps muscle | | | | pSport1 |
| S0366 | Human Soleus | Soleus Muscle | | | | pSport1 |
| S0368 | Human Pancreatic | Islets of Langerhans | | | | pSport1 |
| | Langerhans | | | | | |
| S0374 | Normal colon | Normal colon | | | | pSport1 |
| S0376 | Colon Tumor | Colon Tumor | | | disease | pSport1 |
| S0378 | Pancreas normal PCA4 | Pancreas Normal | | | | pSport1 |
| | No | PCA4No | | | | |
| S0380 | Pancreas Tumor PCA4 Tu | Pancreas Tumor | | | disease | pSport1 |
| | | PCA4 Tu | | | | |
| S0382 | Larynx carcinoma IV | Larynx carcinoma | | | disease | pSport1 |
| S0384 | Tongue carcinoma | Tongue carcinoma | | | disease | pSport1 |
| S0386 | Human Whole Brain, re- | Whole brain | Brain | | | ZAP Express |
| | excision | | | | | |
| S0388 | Human | Human | | | disease | Uni-ZAP |
| | Hypothalamus, schizophre- | Hypothalamus, | | | | XR |
| | nia, re-excision | Schizophrenia | | | | |
| S0390 | Smooth muscle, control; | Smooth muscle | Pulmanary | Cell Line | | Uni-ZAP |
| | re-excision | | artery | | | XR |
| S0392 | Salivary Gland | Salivary gland; | | | | pSport1 |
| | | normal | | | | |
| S0404 | Rectum normal | Rectum, normal | | | | pSport1 |
| S0410 | Colon, tumour | Colon, tumour | | | | pSport1 |
| S0414 | Hippocampus, Alzheimer | Hippocampus, | | | | Other |
| | Subtracted | Alzheimer | | | | |
| | | Subtracted | | | | |
| S0418 | CHME Cell Line; treated 5 | CHME Cell Line; | | | | pCMVSport |
| | hrs | treated | | | | 3.0 |
| S0420 | CHME Cell | CHME Cell line, | | | | pSport1 |
| | Line, untreated | untreated | | | | |
| S0422 | Mo7e Cell Line GM-CSF | Mo7e Cell Line | | | | pCMVSport |
| | treated (1 ng/ml) | GM-CSF treated | | | | 3.0 |
| | | (1 ng/ml) | | | | |
| S0424 | TF-1 Cell Line GM-CSF | TF-1 Cell Line | | | | pSport1 |
| | Treated | GM-CSF Treated | | | | |
| S0426 | Monocyte activated; re- | Monocyte-activated | blood | Cell Line | | Uni-ZAP |
| | excision | | | | | XR |
| S0432 | Sinus piniformis Tumour | Sinus piniformis | | | | pSport1 |
| | | Tumour | | | | |
| S0434 | Stomach Normal | Stomach Normal | | | disease | pSport1 |
| S0438 | Liver Normal Met5No | Liver Normal | | | | pSport1 |
| | | Met5No | | | | |
| S0442 | Colon Normal | Colon Normal | | | | pSport1 |
| S0444 | Colon Tumor | Colon Tumour | | | disease | pSport1 |
| S0456 | Tongue Normal | Tongue Normal | | | | pSport1 |
| S0462 | Thyroid Thyroiditis | Thyroid Thyroiditis | | | | pSport1 |
| S0464 | Larynx Normal | Larynx Normal | | | | pSport1 |
| S0468 | Ea.hy.926 cell line | Ea.hy.926 cell line | | | | pSport1 |
| S0474 | Human blood platelets | Platelets | Blood | | | Other |
| | | | platelets | | | |
| S0665 | Human Amygdala; re- | Amygdala | | | | Uni-ZAP |
| | excission | | | | | XR |
| S3012 | Smooth Muscle Serum | Smooth muscle | Pulmanary | Cell Line | | pBluescript |
| | Treated, Norm | | artery | | | |
| S3014 | Smooth muscle, serum | Smooth muscle | Pulmanary | Cell Line | | pBluescript |
| | induced, re-exc | | artery | | | |
| S6022 | H. Adipose Tissue | Human Adipose | | | | Uni-ZAP |
| | | Tissue | | | | XR |
| S6024 | Alzheimers, spongy | Alzheimer's/Spongy | Brain | | disease | Uni-ZAP |
| | change | change | | | | XR |
| S6026 | Frontal Lobe, Dementia | Frontal Lobe | Brain | | | Uni-ZAP |
| | | dementia/Alzheimer's | | | | XR |
| S6028 | Human Manic Depression | Human Manic | Brain | | disease | Uni-ZAP |
| | Tissue | depression tissue | | | | XR |
| T0002 | Activated T-cells | Activated T-Cell, | Blood | Cell Line | | pBluescript |
| | | PBL fraction | | | | SK- |
| T0003 | Human Fetal Lung | Human Fetal Lung | | | | pBluescript |
| | | | | | | SK- |
| T0004 | Human White Fat | Human White Fat | | | | pBluescript |
| | | | | | | SK- |
| T0006 | Human Pineal Gland | Human Pinneal | | | | pBluescript |
| | | Gland | | | | SK- |
| T0010 | Human Infant Brain | Human Infant Brain | | | | Other |
| T0023 | Human Pancreatic | Human Pancreatic | | | disease | pBluescript |
| | Carcinoma | Carcinoma | | | | SK- |
| T0039 | HSA 172 Cells | Human HSA172 cell | | | | pBluescript |
| | | line | | | | SK- |
| T0041 | Jurkat T-cell G1 phase | Jurkat T-cell | | | | pBluescript |
| | | | | | | SK- |
| T0048 | Human Aortic | Human Aortic | | | | pBluescript |
| | Endothelium | Endothilium | | | | SK- |
| T0049 | Aorta endothelial cells + | Aorta endothelial | | | | pBluescript |
| | TNF-a | cells | | | | SK- |
| T0067 | Human Thyroid | Human Thyroid | | | | pBluescript |
| | | | | | | SK- |
| T0071 | Human Bone Marrow | Human Bone | | | | pBluescript |
| | | Marrow | | | | SK- |
| T0086 | Human Pancreatic | Human Pancreatic | | | disease | pBluescript |
| | Carcinoma-Screened | Carcinoma | | | | SK- |
| T0115 | Human Colon Carcinoma | | | | | pBluescript |
| | (HCC) cell line | | | | | SK- |
| L0002 | Atrium cDNA library | | | | | |
| | Human heart | | | | | |
| L0005 | Clontech human aorta | | | | | |
| | polyA + mRNA (#6572) | | | | | |
| L0021 | Human adult (K.Okubo) | | | | | |
| L0055 | Human promyelocyte | | | | | |
| L0065 | Liver HepG2 cell line. | | | | | |
| L0105 | Human aorta polyA+ | aorta | | | | |
| | (TFujiwara) | | | | | |
| L0106 | Human bone marrow | bone marrow | | | | |
| | (Bi, A.) | | | | | |
| L0109 | Human brain cDNA | brain | | | | |
| L0142 | Human placenta cDNA | placenta | | | | |
| | (TFujiwara) | | | | | |
| L0157 | Human fetal brain | | brain | | | |
| | (TFujiwara) | | | | | |
| L0163 | Human heart cDNA | | heart | | | |
| | (YNakamura) | | | | | |
| L0177 | Human newborn | | | Clonetics | | |
| | melanocytes (T.Vogt) | | | Corp. | | |
| | | | | (San | | |
| | | | | Diego, | | |
| | | | | CA) | | |
| | | | | strain #68 | | |
| | | | | and 2486 | | |
| L0194 | Human pancreatic cancer | pancreatic cancer | | Patu | | |
| | cell line Patu 8988t | | | 8988t | | |
| L0351 | Infant brain, Bento Soares | | | | | BA, M13- |
| | | | | | | derived |
| L0352 | Normalized infant brain, | | | | | BA, M13- |
| | Bento Soares | | | | | derived |
| L0361 | Stratagene ovary | | ovary | | | Bluescript |
| | (#937217) | | | | | SK |
| L0362 | Stratagene ovarian cancer | | | | | Bluescript |
| | (#937219) | | | | | SK- |
| L0363 | NCI_CGAP_GC2 | germ cell tumor | | | | Bluescript |
| | | | | | | SK- |
| L0364 | NCI_CGAP_GC5 | germ cell tumor | | | | Bluescript |
| | | | | | | SK- |
| L0366 | Stratagene schizo brain | schizophrenic brain | | | | Bluescript |
| | S11 | S-11 frontal lobe | | | | SK- |
| L0369 | NCI_CGAP_AA1 | adrenal adenoma | adrenal gland | | | Bluescript |
| | | | | | | SK- |
| L0371 | NCI_CGAP_Br3 | breast tumor | breast | | | Bluescript |
| | | | | | | SK- |
| L0372 | NCI_CGAP_Co12 | colon tumor | colon | | | Bluescript |
| | | | | | | SK- |
| L0373 | NCI_CGAP_Co11 | tumor | colon | | | Bluescript |
| | | | | | | SK- |
| L0374 | NCI_CGAP_Co2 | tumor | colon | | | Bluescript |
| | | | | | | SK- |
| L0375 | NCI_CGAP_Kid6 | kidney tumor | kidney | | | Bluescript |
| | | | | | | SK- |
| L0378 | NCI_CGAP_Lu1 | lung tumor | lung | | | Bluescript |
| | | | | | | SK- |
| L0381 | NCI_CGAP_HN4 | squamous cell | pharynx | | | Bluescript |
| | | carcinoma | | | | SK- |
| L0382 | NCI_CGAP_Pr25 | epithelium (cell line) | prostate | | | Bluescript |
| | | | | | | SK- |
| L0383 | NCI_CGAP_Pr24 | invasive tumor (cell | prostate | | | Bluescript |
| | | line) | | | | SK- |
| L0384 | NCI_CGAP_Pr23 | prostate tumor | prostate | | | Bluescript |
| | | | | | | SK- |
| L0387 | NCI_CGAP_GCB0 | germinal center B- | tonsil | | | Bluescript |
| | | cells | | | | SK- |
| L0388 | NCI_CGAP_HN6 | normal gingiva (cell | | | | Bluescript |
| | | line from | | | | SK- |
| | | immortalized kerati | | | | |
| L0389 | NCI_CGAP_HN5 | normal gingiva (cell | | | | Bluescript |
| | | line from primary | | | | SK- |
| | | keratinocyt | | | | |
| L0435 | Infant brain, LLNL array | | | | | lafmid BA |
| | of Dr. M. Soares 1NIB | | | | | |
| L0438 | normalized infant brain | total brain | brain | | | lafmid BA |
| | cDNA | | | | | |
| L0439 | Soares infant brain 1NIB | | whole brain | | | Lafmid BA |
| L0448 | 3HFLSK20 | | | | | Lafmid K |
| L0455 | Human retina cDNA | retina | eye | | | lambda gt10 |
| | randomly primed | | | | | |
| | sublibrary | | | | | |
| L0471 | Human fetal heart, | | | | | Lambda |
| | Lambda ZAP Express | | | | | ZAP Express |
| L0475 | KG1-a Lambda Zap | | | KG1-a | | Lambda Zap |
| | Express cDNA library | | | | | Express |
| | | | | | | (Stratagene) |
| L0480 | Stratagene cat#937212 | | | | | Lambda |
| | (1992) | | | | | ZAP, |
| | | | | | | pBluescript |
| | | | | | | SK(−) |
| L0483 | Human pancreatic islet | | | | | Lambda |
| | | | | | | ZAPII |
| L0485 | STRATAGENE Human | skeletal muscle | leg muscle | | | Lambda |
| | skeletal muscle cDNA | | | | | ZAPII |
| | library, cat. #936215 | | | | | |
| L0517 | NCI_CGAP_Pr1 | | | | | pAMP10 |
| L0518 | NCI_CGAP_Pr2 | | | | | pAMP10 |
| L0519 | NCI_CGAP_Pr3 | | | | | pAMP10 |
| L0520 | NCI_CGAP_Alv1 | alveolar | | | | pAMP10 |
| | | rhabdomyosarcoma | | | | |
| L0521 | NCI_CGAP_Ew1 | Ewing's sarcoma | | | | pAMP10 |
| L0526 | NCI_CGAP_Pr12 | metastatic prostate | | | | pAMP10 |
| | | bone lesion | | | | |
| L0527 | NCI_CGAP_Ov2 | ovary | | | | pAMP10 |
| L0528 | NCI_CGAP_Pr5 | prostate | | | | pAMP10 |
| L0530 | NCI_CGAP_Pr8 | prostate | | | | pAMP10 |
| L0534 | Chromosome 7 Fetal | brain | brain | | | pAMP10 |
| | Brain cDNA Library | | | | | |
| L0542 | NCI_CGAP_Pr11 | normal prostatic | prostate | | | pAMP10 |
| | | epithelial cells | | | | |
| L0544 | NCI_CGAP_Pr4 | prostatic | prostate | | | pAMP10 |
| | | intraepithelial | | | | |
| | | neoplasia - high | | | | |
| | | grade | | | | |
| L0545 | NCI_CGAP_Pr4.1 | prostatic | prostate | | | pAMP10 |
| | | intraepithelial | | | | |
| | | neoplasia - high | | | | |
| | | grade | | | | |
| L0563 | Human Bone Marrow | bone marrow | | | | pBluescript |
| | Stromal Fibroblast | | | | | |
| L0564 | Jia bone marrow stroma | bone marrow stroma | | | | pBluescript |
| L0565 | Normal Human | Bone | Hip | | | pBluescript |
| | Trabecular Bone Cells | | | | | |
| L0581 | Stratagene liver (#937224) | | liver | | | pBluescript |
| | | | | | | SK |
| L0588 | Stratagene endothelial cell | | | | | pBluescript |
| | 937223 | | | | | SK- |
| L0589 | Stratagene fetal retina | | | | | pBluescript |
| | 937202 | | | | | SK- |
| L0591 | Stratagene HeLa cell s3 | | | | | pBluescript |
| | 937216 | | | | | SK- |
| L0592 | Stratagene hNT neuron | | | | | pBluescript |
| | (#937233) | | | | | SK- |
| L0593 | Stratagene | | | | | pBluescript |
| | neuroepithelium | | | | | SK- |
| | (#937231) | | | | | |
| L0595 | Stratagene NT2 neuronal | neuroepithelial cells | brain | | | pBluescript |
| | precursor 937230 | | | | | SK- |
| L0596 | Stratagene colon | | colon | | | pBluescript |
| | (#937204) | | | | | SK- |
| L0598 | Morton Fetal Cochlea | cochlea | ear | | | pBluescript |
| | | | | | | SK- |
| L0599 | Stratagene lung (#937210) | | lung | | | pBluescript |
| | | | | | | SK- |
| L0600 | Weizmann Olfactory | olfactory epithelium | nose | | | pBluescript |
| | Epithelium | | | | | SK- |
| L0601 | Stratagene pancreas | | pancreas | | | pBluescript |
| | (#937208) | | | | | SK- |
| L0602 | Pancreatic Islet | pancreatic islet | pancreas | | | pBluescript |
| | | | | | | SK- |
| L0603 | Stratagene placenta | | placenta | | | pBluescript |
| | (#937225) | | | | | SK- |
| L0604 | Stratagene muscle 937209 | muscle | skeletal | | | pBluescript |
| | | | muscle | | | SK- |
| L0605 | Stratagene fetal spleen | fetal spleen | spleen | | | pBluescript |
| | (#937205) | | | | | SK- |
| L0606 | NCI_CGAP_Lym5 | follicular lymphoma | lymph node | | | pBluescript |
| | | | | | | SK- |
| L0607 | NCI_CGAP_Lym6 | mantle cell | lymph node | | | pBluescript |
| | | lymphoma | | | | SK- |
| L0608 | Stratagene lung carcinoma | lung carcinoma | lung | NCI-H69 | | pBluescript |
| | 937218 | | | | | SK- |
| L0622 | HM1 | | | | | pcDNAII |
| | | | | | | (Invitrogen) |
| L0630 | NCI_CGAP_CNS1 | substantia nigra | brain | | | pCMV- |
| | | | | | | SPORT4 |
| L0634 | NCI_CGAP_Ov8 | serous | ovary | | | pCMV- |
| | | adenocarcinoma | | | | SPORT4 |
| L0635 | NCI_CGAP_PNS1 | dorsal root ganglion | peripheral | | | pCMV- |
| | | | nervous | | | SPORT4 |
| | | | system | | | |
| L0636 | NCI_CGAP_Pit1 | four pooled pituitary | brain | | | pCMV- |
| | | adenomas | | | | SPORT6 |
| L0637 | NCI_CGAP_Brn53 | three pooled | brain | | | pCMV- |
| | | meningiomas | | | | SPORT6 |
| L0638 | NCI_CGAP_Brn35 | tumor, 5 pooled (see | brain | | | pCMV- |
| | | description) | | | | SPORT6 |
| L0639 | NCI_CGAP_Brn52 | tumor, 5 pooled (see | brain | | | pCMV- |
| | | description) | | | | SPORT6 |
| L0640 | NCI_CGAP_Br18 | four pooled high- | breast | | | pCMV- |
| | | grade tumors, | | | | SPORT6 |
| | | including two prima | | | | |
| L0641 | NCI_CGAP_Co17 | juvenile granulosa | colon | | | pCMV- |
| | | tumor | | | | SPORT6 |
| L0646 | NCI_CGAP_Co14 | moderately- | colon | | | pCMV- |
| | | differentiated | | | | SPORT6 |
| | | adenocarcinoma | | | | |
| L0647 | NCI_CGAP_Sar4 | five pooled | connective | | | pCMV- |
| | | sarcomas, including | tissue | | | SPORT6 |
| | | myxoid liposarcoma | | | | |
| L0648 | NCI_CGAP_Eso2 | squamous cell | esophagus | | | pCMV- |
| | | carcinoma | | | | SPORT6 |
| L0649 | NCI_CGAP_GU1 | 2 pooled high-grade | genitourinary | | | pCMV- |
| | | transitional cell | tract | | | SPORT6 |
| | | tumors | | | | |
| L0650 | NCI_CGAP_Kid13 | 2 pooled Wilms' | kidney | | | pCMV- |
| | | tumors, one primary | | | | SPORT6 |
| | | and one metast | | | | |
| L0653 | NCI_CGAP_Lu28 | two pooled | lung | | | pCMV- |
| | | squamous cell | | | | SPORT6 |
| | | carcinomas | | | | |
| L0655 | NCI_CGAP_Lym12 | lymphoma, | lymph node | | | pCMV- |
| | | follicular mixed | | | | SPORT6 |
| | | small and large cell | | | | |
| L0657 | NCI_CGAP_Ov23 | tumor, 5 pooled (see | ovary | | | pCMV- |
| | | description) | | | | SPORT6 |
| L0658 | NCI_CGAP_Ov35 | tumor, 5 pooled (see | ovary | | | pCMV- |
| | | description) | | | | SPORT6 |
| L0659 | NCI_CGAP_Pan1 | adenocarcinoma | pancreas | | | pCMV- |
| | | | | | | SPORT6 |
| L0661 | NCI_CGAP_Mel15 | malignant | skin | | | pCMV- |
| | | melanoma, | | | | SPORT6 |
| | | metastatic to lymph | | | | |
| | | node | | | | |
| L0662 | NCI_CGAP_Gas4 | poorly differentiated | stomach | | | pCMV- |
| | | adenocarcinoma | | | | SPORT6 |
| | | with signet r | | | | |
| L0663 | NCI_CGAP_Ut2 | moderately- | uterus | | | pCMV- |
| | | differentiated | | | | SPORT6 |
| | | endometrial | | | | |
| | | adenocarcino | | | | |
| L0664 | NCI_CGAP_Ut3 | poorly-differentiated | uterus | | | pCMV- |
| | | endometrial | | | | SPORT6 |
| | | adenocarcinoma, | | | | |
| L0665 | NCI_CGAP_Ut4 | serous papillary | uterus | | | pCMV- |
| | | carcinoma, high | | | | SPORT6 |
| | | grade, 2 pooled t | | | | |
| L0666 | NCI_CGAP_Ut1 | well-differentiated | uterus | | | pCMV- |
| | | endometrial | | | | SPORT6 |
| | | adenocarcinoma, 7 | | | | |
| L0667 | NCI_CGAP_CML1 | myeloid cells, 18 | whole blood | | | pCMV- |
| | | pooled CML cases, | | | | SPORT6 |
| | | BCR/ABL rearra | | | | |
| L0717 | Gessler Wilms tumor | | | | | pSPORT1 |
| L0720 | PN001-Normal Human | | prostate | | | pSport1 |
| | Prostate | | | | | |
| L0731 | Soares_pregnant_uterus_{—} | | uterus | | | pT7T3-Pac |
| | NbHPU | | | | | |
| L0740 | Soares melanocyte | melanocyte | | | | pT7T3D |
| | 2NbHM | | | | | (Pharmacia) |
| | | | | | | with a |
| | | | | | | modified |
| | | | | | | polylinker |
| L0741 | Soares adult brain | | brain | | | pT7T3D |
| | N2b4HB55Y | | | | | (Pharmacia) |
| | | | | | | with a |
| | | | | | | modified |
| | | | | | | polylinker |
| L0742 | Soares adult brain | | brain | | | pT7T3D |
| | N2b5HB55Y | | | | | (Pharmacia) |
| | | | | | | with a |
| | | | | | | modified |
| | | | | | | polylinker |
| L0743 | Soares breast 2NbHBst | | breast | | | pT7T3D |
| | | | | | | (Pharmacia) |
| | | | | | | with a |
| | | | | | | modified |
| | | | | | | polylinker |
| L0744 | Soares breast 3NbHBst | | breast | | | pT7T3D |
| | | | | | | (Pharmacia) |
| | | | | | | with a |
| | | | | | | modified |
| | | | | | | polylinker |
| L0745 | Soares retina N2b4HR | retina | eye | | | pT7T3D |
| | | | | | | (Pharmacia) |
| | | | | | | with a |
| | | | | | | modified |
| | | | | | | polylinker |
| L0747 | Soares_fetal_heart_NbHH19 W | | heart | | | pT7T3D |
| | | | | | | (Pharmacia) |
| | | | | | | with a |
| | | | | | | modified |
| | | | | | | polylinker |
| L0748 | Soares fetal liver spleen | | Liver and | | | pT7T3D |
| | 1NFLS | | Spleen | | | (Pharmacia) |
| | | | | | | with a |
| | | | | | | modified |
| | | | | | | polylinker |
| L0749 | Soares_fetal_liver_spleen_{—} | | Liver and | | | pT7T3D |
| | 1NFLS_S1 | | Spleen | | | (Pharmacia) |
| | | | | | | with a |
| | | | | | | modified |
| | | | | | | polylinker |
| L0750 | Soares_fetal_lung_NbHL19W | | lung | | | pT7T3D |
| | | | | | | (Pharmacia) |
| | | | | | | with a |
| | | | | | | modified |
| | | | | | | polylinker |
| L0751 | Soares ovary tumor | ovarian tumor | ovary | | | pT7T3D |
| | NbHOT | | | | | (Pharmacia) |
| | | | | | | with a |
| | | | | | | modified |
| | | | | | | polylinker |
| L0752 | Soares_parathyroid_tumor_{—} | parathyroid tumor | parathyroid | | | pT7T3D |
| | NbHPA | | gland | | | (Pharmacia) |
| | | | | | | with a |
| | | | | | | modified |
| | | | | | | polylinker |
| L0753 | Soares_pineal_gland_N3HPG | | pineal gland | | | pT7T3D |
| | | | | | | (Pharmacia) |
| | | | | | | with a |
| | | | | | | modified |
| | | | | | | polylinker |
| L0754 | Soares placenta Nb2HP | | placenta | | | pT7T3D |
| | | | | | | (Pharmacia) |
| | | | | | | with a |
| | | | | | | modified |
| | | | | | | polylinker |
| L0755 | Soares_placenta_8to9wee | | placenta | | | pT7T3D |
| | ks_2NbHP8to9W | | | | | (Pharmacia) |
| | | | | | | with a |
| | | | | | | modified |
| | | | | | | polylinker |
| L0756 | Soares_multiple_sclerosis_{—} | multiple sclerosis | | | | pT7T3D |
| | 2NbHMSP | lesions | | | | (Pharmacia) |
| | | | | | | with a |
| | | | | | | modified |
| | | | | | | polylinker |
| | | | | | | V_TYPE |
| L0757 | Soares_senescent_fibrobla | senescent fibroblast | | | | pT7T3D |
| | sts_NbHSF | | | | | (Pharmacia) |
| | | | | | | with a |
| | | | | | | modified |
| | | | | | | polylinker |
| | | | | | | V_TYPE |
| L0758 | Soares_testis_NHT | | | | | pT7T3D-Pac |
| | | | | | | (Pharmacia) |
| | | | | | | with a |
| | | | | | | modified |
| | | | | | | polylinker |
| L0759 | Soares_total_fetus_Nb2H | | | | | pT7T3D-Pac |
| | F8_9w | | | | | (Pharmacia) |
| | | | | | | with a |
| | | | | | | modified |
| | | | | | | polylinker |
| L0761 | NCI_CGAP_CLL1 | B-cell, chronic | | | | pT7T3D-Pac |
| | | lymphotic leukemia | | | | (Pharmacia) |
| | | | | | | with a |
| | | | | | | modified |
| | | | | | | polylinker |
| L0762 | NCI_CGAP_Br1.1 | breast | | | | pT7T3D-Pac |
| | | | | | | (Pharmacia) |
| | | | | | | with a |
| | | | | | | modified |
| | | | | | | polylinker |
| L0763 | NCI_CGAP_Br2 | breast | | | | pT7T3D-Pac |
| | | | | | | (Pharmacia) |
| | | | | | | with a |
| | | | | | | modified |
| | | | | | | polylinker |
| L0764 | NCI_CGAP_Co3 | colon | | | | pT7T3D-Pac |
| | | | | | | (Pharmacia) |
| | | | | | | with a |
| | | | | | | modified |
| | | | | | | polylinker |
| L0766 | NCI_CGAP_GCB1 | germinal center B | | | | pT7T3D-Pac |
| | | cell | | | | (Pharmacia) |
| | | | | | | with a |
| | | | | | | modified |
| | | | | | | polylinker |
| L0767 | NCI_CGAP_GC3 | pooled germ cell | | | | pT7T3D-Pac |
| | | tumors | | | | (Pharmacia) |
| | | | | | | with a |
| | | | | | | modified |
| | | | | | | polylinker |
| L0768 | NCI_CGAP_GC4 | pooled germ cell | | | | pT7T3D-Pac |
| | | tumors | | | | (Pharmacia) |
| | | | | | | with a |
| | | | | | | modified |
| | | | | | | polylinker |
| L0769 | NCI_CGAP_Brn25 | anaplastic | brain | | | pT7T3D-Pac |
| | | oligodendroglioma | | | | (Pharmacia) |
| | | | | | | with a |
| | | | | | | modified |
| | | | | | | polylinker |
| L0770 | NCI_CGAP_Brn23 | glioblastoma | brain | | | pT7T3D-Pac |
| | | (pooled) | | | | (Pharmacia) |
| | | | | | | with a |
| | | | | | | modified |
| | | | | | | polylinker |
| L0771 | NCI_CGAP_Co8 | adenocarcinoma | colon | | | pT7T3D-Pac |
| | | | | | | (Pharmacia) |
| | | | | | | with a |
| | | | | | | modified |
| | | | | | | polylinker |
| L0772 | NCI_CGAP_Co10 | colon tumor RER+ | colon | | | pT7T3D-Pac |
| | | | | | | (Pharmacia) |
| | | | | | | with a |
| | | | | | | modified |
| | | | | | | polylinker |
| L0774 | NCI_CGAP_Kid3 | | kidney | | | pT7T3D-Pac |
| | | | | | | (Pharmacia) |
| | | | | | | with a |
| | | | | | | modified |
| | | | | | | polylinker |
| L0775 | NCI_CGAP_Kid5 | 2 pooled tumors | kidney | | | pT7T3D-Pac |
| | | (clear cell type) | | | | (Pharmacia) |
| | | | | | | with a |
| | | | | | | modified |
| | | | | | | polylinker |
| L0776 | NCI_CGAP_Lu5 | carcinoid | lung | | | pT7T3D-Pac |
| | | | | | | (Pharmacia) |
| | | | | | | with a |
| | | | | | | modified |
| | | | | | | polylinker |
| L0777 | Soares_NhHMPu_S1 | Pooled human | mixed (see | | | pT7T3D-Pac |
| | | melanocyte, fetal | below) | | | (Pharmacia) |
| | | heart, and pregnant | | | | with a |
| | | | | | | modified |
| | | | | | | polylinker |
| L0779 | Soares_NFL_T_GBC_S1 | | pooled | | | pT7T3D-Pac |
| | | | | | | (Pharmacia) |
| | | | | | | with a |
| | | | | | | modified |
| | | | | | | polylinker |
| L0780 | Soares_NSF_F8_9W_OT_{—} | | pooled | | | pT7T3D-Pac |
| | PA_P_S1 | | | | | (Pharmacia) |
| | | | | | | with a |
| | | | | | | modified |
| | | | | | | polylinker |
| L0782 | NCI_CGAP_Pr21 | normal prostate | prostate | | | pT7T3D-Pac |
| | | | | | | (Pharmacia) |
| | | | | | | with a |
| | | | | | | modified |
| | | | | | | polylinker |
| L0783 | NCI_CGAP_Pr22 | normal prostate | prostate | | | pT7T3D-Pac |
| | | | | | | (Pharmacia) |
| | | | | | | with a |
| | | | | | | modified |
| | | | | | | polylinker |
| L0785 | Barstead spleen HPLRB2 | | spleen | | | pT7T3D-Pac |
| | | | | | | (Pharmacia) |
| | | | | | | with a |
| | | | | | | modified |
| | | | | | | polylinker |
| L0786 | Soares_NbHFB | | whole brain | | | pT7T3D-Pac |
| | | | | | | (Pharmacia) |
| | | | | | | with a |
| | | | | | | modified |
| | | | | | | polylinker |
| L0787 | NCI_CGAP_Sub1 | | | | | pT7T3D-Pac |
| | | | | | | (Pharmacia) |
| | | | | | | with a |
| | | | | | | modified |
| | | | | | | polylinker |
| L0788 | NCI_CGAP_Sub2 | | | | | pT7T3D-Pac |
| | | | | | | (Pharmacia) |
| | | | | | | with a |
| | | | | | | modified |
| | | | | | | polylinker |
| L0789 | NCI_CGAP_Sub3 | | | | | pT7T3D-Pac |
| | | | | | | (Pharmacia) |
| | | | | | | with a |
| | | | | | | modified |
| | | | | | | polylinker |
| L0790 | NCI_CGAP_Sub4 | | | | | pT7T3D-Pac |
| | | | | | | (Pharmacia) |
| | | | | | | with a |
| | | | | | | modified |
| | | | | | | polylinker |
| L0791 | NCI_CGAP_Sub5 | | | | | pT7T3D-Pac |
| | | | | | | (Pharmacia) |
| | | | | | | with a- |
| | | | | | | modified |
| | | | | | | polylinker |
| L0792 | NCI_CGAP_Sub6 | | | | | pT7T3D-Pac |
| | | | | | | (Pharmacia) |
| | | | | | | with a |
| | | | | | | modified |
| | | | | | | polylinker |
| L0793 | NCI_CGAP_Sub7 | | | | | pT7T3D-Pac |
| | | | | | | (Pharmacia) |
| | | | | | | with a |
| | | | | | | modified |
| | | | | | | polylinker |
| L0794 | NCI_CGAP_GC6 | pooled germ cell | | | | pT7T3D-Pac |
| | | tumors | | | | (Pharmacia) |
| | | | | | | with a |
| | | | | | | modified |
| | | | | | | polylinker |
| L0796 | NCI_CGAP_Brn50 | medulloblastoma | brain | | | pT7T3D-Pac |
| | | | | | | (Pharmacia) |
| | | | | | | with a |
| | | | | | | modified |
| | | | | | | polylinker |
| L0800 | NCI_CGAP_Co16 | colon tumor, RER+ | colon | | | pT7T3D-Pac |
| | | | | | | (Pharmacia) |
| | | | | | | with a |
| | | | | | | modified |
| | | | | | | polylinker |
| L0803 | NCI_CGAP_Kid11 | | kidney | | | pT7T3D-Pac |
| | | | | | | (Pharmacia) |
| | | | | | | with a |
| | | | | | | modified |
| | | | | | | polylinker |
| L0804 | NCI_CGAP_Kid12 | 2 pooled tumors | kidney | | | pT7T3D-Pac |
| | | (clear cell type) | | | | (Pharmacia) |
| | | | | | | with a |
| | | | | | | modified |
| | | | | | | polylinker |
| L0805 | NCI_CGAP_Lu24 | carcinoid | lung | | | pT7T3D-Pac |
| | | | | | | (Pharmacia) |
| | | | | | | with a |
| | | | | | | modified |
| | | | | | | polylinker |
| L0806 | NCI_CGAP_Lu19 | squamous cell | lung | | | pT7T3D-Pac |
| | | carcinoma, poorly | | | | (Pharmacia) |
| | | differentiated (4 | | | | with a |
| | | | | | | modified |
| | | | | | | polylinker |
| L0807 | NCI_CGAP_Ov18 | fibrotheoma | ovary | | | pT7T3D-Pac |
| | | | | | | (Pharmacia) |
| | | | | | | with a |
| | | | | | | modified |
| | | | | | | polylinker |
| L0809 | NCI_CGAP_Pr28 | | prostate | | | pT7T3D-Pac |
| | | | | | | (Pharmacia) |
| | | | | | | with a |
| | | | | | | modified |
| | | | | | | polylinker |

[0090] TABLE 5

| OMIM Reference | Description |
|---|---|
| 113900 | Heart block, progressive |
| | familial, type I |
| 126340 | Xeroderma pigmentosum, group D, 278730 |
| 126391 | DNA ligase I deficiency |
| 130410 | Glutaricaciduria, type IIB |
| 134790 | Hyperferritinemia-cataract |
| | syndrome, 600886 |
| 138570 | Non-insulin dependent diabetes |
| | mellitus, susceptibility to |
| 160900 | Myotonic dystrophy |
| 173850 | Polio, susceptibility to |
| 258501 | 3-methylglutaconicaciduria, type III |
| 300018 | Pseudohermaphroditism, male |
| 300075 | Coffin-Lowry syndrome, 303600 |
| 300077 | Mental retardation, X-linked 29 |
| 300200 | Adrenal hypoplasia, congenital, |
| | with hypogonadotropic hypogonadism |
| 301200 | Amelogenesis imperfecta |
| 301220 | Partington syndrome II |
| 302350 | Nance-Horan syndrome |
| 306000 | Glycogenosis, X-linked hepatic, type I |
| 306000 | Glycogenosis, X-linked hepatic, type II |
| 306100 | Gonadal dysgenesis, XY female type |
| 307030 | Glycerol kinase deficiency |
| 307800 | Hypophosphatemia, hereditary |
| 309470 | Mental retardation, X-linked, |
| | syndromic-3, with spastic diplegia |
| 309510 | Mental retardation, X-linked, |
| | syndromic-1, with dystonic movements, |
| | ataxia, and seizures |
| 309585 | Mental retardation, X-linked, |
| | syndromic-6, with gynecomastia |
| | and obesity |
| 311770 | Paroxysmal nocturnal hemoglobinuria |
| 312040 | N syndrome, 310465 |
| 312170 | Pyruvate dehydrogenase deficiency |
| 312612 | Retinitis pigmentosa-6 |
| 312700 | Retinoschisis |
| 313400 | Spondyloepiphyseal dysplasia tarda |
| 600040 | Colorectal cancer |
| 602225 | Cone-rod retinal dystrophy-2, 120970 |
| 602225 | Leber congenital amaurosis, type III |

[0091] Polynucleotide and Polypeptide Variants

[0092] The present invention is directed to variants of the polynucleotide sequence disclosed in SEQ ID NO:X or the complementary strand thereto, nucleotide sequences encoding the polypeptide of SEQ ID NO:Y, the nucleotide sequence of SEQ ID NO:X encoding the polypeptide sequence as defined in column 7 of Table 1A, nucleotide sequences encoding the polypeptide as defined in column 7 of Table 1A, the nucleotide sequence as defined in columns 8 and 9 of Table 2, nucleotide sequences encoding the polypeptide encoded by the nucleotide sequence as defined in columns 8 and 9 of Table 2, the nucleotide sequence as defined in column 6 of Table 1B, nucleotide sequences encoding the polypeptide encoded by the nucleotide sequence as defined in column 6 of Table 1B, the cDNA sequence contained in Clone ID NO:Z, and/or nucleotide sequences encoding the polypeptide encoded by the cDNA sequence contained in Clone ID NO:Z.

[0093] The present invention also encompasses variants of the polypeptide sequence disclosed in SEQ ID NO:Y, the polypeptide sequence as defined in column 7 of Table 1A, a w polypeptide sequence encoded by the polynucleotide sequence in SEQ ID NO:X, a polypeptide sequence encoded by the nucleotide sequence as defined in columns 8 and 9 of Table 2, a polypeptide sequence encoded by the nucleotide sequence as de fined in column 6 of Table 1B, a polypeptide sequence encoded by the complement of the polynucleotide sequence in SEQ ID NO:X, and/or a polypeptide sequence encoded by the cDNA sequence contained in Clone ID NO:Z.

[0094] “Variant” refers to a polynucleotide or polypeptide differing from the polynucleotide or polypeptide of the present invention, but retaining essential properties thereof Generally, variants are overall closely similar, and, in many regions, identical to the polynucleotide or polypeptide of the present invention.

[0095] Thus, one aspect of the invention provides an isolated nucleic acid molecule comprising, or alternatively consisting of, a polynucleotide having a nucleotide sequence selected from the group consisting of: (a) a nucleotide sequence described in SEQ ID NO:X or contained in the cDNA sequence of Clone ID NO:Z; (b) a nucleotide sequence in SEQ ID NO:X or the cDNA in Clone ID NO:Z which encodes the complete amino acid sequence of SEQ ID NO:Y or the complete amino acid sequence encoded by the cDNA in Clone ID NO:Z; (c) a nucleotide sequence in SEQ ID NO:X or the cDNA in Clone ID NO:Z which encodes a mature polypeptide; (d) a nucleotide sequence in SEQ ID NO:X or the cDNA sequence of Clone ID NO:Z, which encodes a biologically active fragment of a polypeptide; (e) a nucleotide sequence in SEQ ID NO:X or the cDNA sequence of Clone ID NO:Z, which encodes an antigenic fragment of a polypeptide; (f) a nucleotide sequence encoding a polypeptide comprising the complete amino acid sequence of SEQ ID NO:Y or the complete amino acid sequence encoded by the cDNA in Clone ID NO:Z; (g) a nucleotide sequence encoding a mature polypeptide of the amino acid sequence of SEQ ID NO:Y or the amino acid sequence encoded by the cDNA in Clone ID NO:Z; (h) a nucleotide sequence encoding a biologically active fragment of a polypeptide having the complete amino acid sequence of SEQ ID NO:Y or the complete amino acid sequence encoded by the cDNA in Clone ID NO:Z; (i) a nucleotide sequence encoding an antigenic fragment of a polypeptide having the complete amino acid sequence of SEQ ID NO:Y or the complete amino acid sequence encoded by the cDNA in Clone ID NO:Z; and (j) a nucleotide sequence complementary to any of the nucleotide sequences in (a), (b), (c), (d), (e), (f), (g), (h), or (i) above.

[0096] The present invention is also directed to nucleic acid molecules which comprise, or alternatively consist of, a nucleotide sequence which is at least 80%, 85%, 90%, 95%, 96%, 97%, 98%, 99% or 100%, identical to, for example, any of the nucleotide sequences in (a), (b), (c), (d), (e), (f), (g), (h), (i), or (j) above, the nucleotide coding sequence in SEQ ID NO:X or the complementary strand thereto, the nucleotide coding sequence of the cDNA contained in Clone ID NO:Z or the complementary strand thereto, a nucleotide sequence encoding the polypeptide of SEQ ID NO:Y, a nucleotide sequence encoding a polypeptide sequence encoded by the nucleotide sequence in SEQ ID NO:X, a polypeptide sequence encoded by the complement of the polynucleotide sequence in SEQ ID NO:X, a nucleotide sequence encoding the polypeptide encoded by the cDNA contained in Clone ID NO:Z, the nucleotide coding sequence in SEQ ID NO:X as defined in columns 8 and 9 of Table 2 or the complementary strand thereto, a nucleotide sequence encoding the polypeptide encoded by the nucleotide sequence in SEQ ID NO:X as defined in columns 8 and 9 of Table 2 or the complementary strand thereto, the nucleotide coding sequence in SEQ ID NO:B as defined in column 6 of Table 1B or the complementary strand thereto, a nucleotide sequence encoding the polypeptide encoded by the nucleotide sequence in SEQ ID NO:B as defined in column 6 of Table 1B or the complementary strand thereto, the nucleotide sequence in SEQ ID NO:X encoding the polypeptide sequence as defined in column 7 of Table 1A or the complementary strand thereto, nucleotide sequences encoding the polypeptide as defined in column 7 of Table 1A or the complementary strand thereto, and/or polynucleotide fragments of any of these nucleic acid molecules (e.g., those fragments described herein). Polynucleotides which hybridize to the complement of these nucleic acid molecules under stringent hybridization conditions or alternatively, under lower stringency conditions, are also encompassed by the invention, as are polypeptides encoded by these polynucleotides and nucleic acids.

[0097] In a preferred embodiment, the invention encompasses nucleic acid molecules which comprise, or alternatively, consist of a polynucleotide which hybridizes under stringent hybridization conditions, or alternatively, under lower stringency conditions, to a polynucleotide in (a), (b), (c), (d), (e), (f), (g), (h), or (i), above, as are polypeptides encoded by these polynucleotides. In another preferred embodiment, polynucleotides which hybridize to the complement of these nucleic acid molecules under stringent hybridization conditions, or alternatively, under lower stringency conditions, are also encompassed by the invention, as are polypeptides encoded by these polynucleotides.

[0098] In another embodiment, the invention provides a purified protein comprising, or alternatively consisting of, a polypeptide having an amino acid sequence selected from the group consisting of: (a) the complete amino acid sequence of SEQ ID NO:Y or the complete amino acid sequence encoded by the cDNA in Clone ID NO:Z; (b) the amino acid sequence of a mature form of a polypeptide having the amino acid sequence of SEQ ID NO:Y or the amino acid sequence encoded by the cDNA in Clone ID NO:Z; (c) the amino acid sequence of a biologically active fragment of a polypeptide having the complete amino acid sequence of SEQ ID NO:Y or the complete amino acid sequence encoded by the cDNA in Clone ID NO:Z; and (d) the amino acid sequence of an antigenic fragment of a polypeptide having the complete amino acid sequence of SEQ ID NO:Y or the complete amino acid sequence encoded by the cDNA in Clone ID NO:Z.

[0099] The present invention is also directed to proteins which comprise, or alternatively consist of, an amino acid sequence which is at least 80%, 85%, 90%, 95%, 96%, 97%, 98%, 99% or 100%, identical to, for example, any of the amino acid sequences in (a), (b), (c), or (d), above, the amino acid sequence shown in SEQ ID NO:Y, the amino acid sequence encoded by the EDNA contained in Clone ID NO:Z, the amino acid sequence of the polypeptide encoded by the nucleotide sequence in SEQ ID NO:X as defined in columns 8 and 9 of Table 2, the amino acid sequence of the polypeptide encoded by the nucleotide sequence in SEQ ID NO:B as defined in column 6 of Table 1B, the amino acid sequence as defined in column 7 of Table 1A, an amino acid sequence encoded by the nucleotide sequence in SEQ ID NO:X, and an amino acid sequence encoded by the complement of the polynucleotide sequence in SEQ ID NO:X. Fragments of these polypeptides are also provided (e.g., those fragments described herein). Further proteins encoded by polynucleotides which hybridize to the complement of the nucleic acid molecules encoding these amino acid sequences under stringent hybridization conditions or alternatively, under lower stringency conditions, are also encompassed by the invention, as are the polynucleotides encoding these proteins.

[0100] By a nucleic acid having a nucleotide sequence at least, for example, 95% “identical” to a reference nucleotide sequence of the present invention, it is intended that the nucleotide sequence of the nucleic acid is identical to the reference sequence except that the nucleotide sequence may include up to five point mutations per each 100 nucleotides of the reference nucleotide sequence encoding the polypeptide. In other words, to obtain a nucleic acid having a nucleotide sequence at least 95% identical to a reference nucleotide sequence, up to 5% of the nucleotides in the reference sequence may be deleted or substituted with another nucleotide, or a number of nucleotides up to 5% of the total nucleotides in the reference sequence may be inserted into the reference sequence. The query sequence may be an entire sequence referred to in Table 1A or 2 as the ORF (open reading frame), or any fragment specified as described herein.

[0101] As a practical matter, whether any particular nucleic acid molecule or polypeptide is at least 80%, 85%, 90%, 95%, 96%, 97%, 98% or 99% identical to a nucleotide sequence of the present invention can be determined conventionally using known computer programs. A preferred method for determining the best overall match between a query sequence (a sequence of the present invention) and a subject sequence, also referred to as a global sequence alignment, can be determined using the FASTDB computer program based on the algorithm of Brutlag et al. (Comp. App. Biosci. 6:237-245 (1990)). In a sequence alignment the query and subject sequences are both DNA sequences. An RNA sequence can be compared by converting U's to T's. The result of said global sequence alignment is expressed as percent identity. Preferred parameters used in a FASTDB alignment of DNA sequences to calculate percent identity are: Matrix=Unitary, k-tuple=4, Mismatch Penalty=1, Joining Penalty=30, Randomization Group Length=0, Cutoff Score=1, Gap Penalty=5, Gap Size Penalty 0.05, Window Size=500 or the length of the subject nucleotide sequence, whichever is shorter.

[0102] If the subject sequence is shorter than the query sequence because of 5′ or 3′ deletions, not because of internal deletions, a manual correction must be made to the results. This is because the FASTDB program does not account for 5′ and 3′ truncations of the subject sequence when calculating percent identity. For subject sequences truncated at the 5′ or 3′ ends, relative to the query sequence, the percent identity is corrected by calculating the number of bases of the query sequence that are 5′ and 3′ of the subject sequence, which are not matched/aligned, as a percent of the total bases of the query sequence. Whether a nucleotide is matched/aligned is determined by results of the FASTDB sequence alignment. This percentage is then subtracted from the percent identity, calculated by the above FASTDB program using the specified parameters, to arrive at a final percent identity score. This corrected score is what is used for the purposes of the present invention. Only bases outside the 5′ and 3′ bases of the subject sequence, as displayed by the FASTDB alignment, which are not matched/aligned with the query sequence, are calculated for the purposes of manually adjusting the percent identity score.

[0103] For example, a 90 base subject sequence is aligned to a 100 base query sequence to determine percent identity. The deletions occur at the 5′ end of the subject sequence and therefore, the FASTDB alignment does not show a matched/alignment of the first 10 bases at 5′ end. The 10 unpaired bases represent 10% of the sequence (number of bases at the 5′ and 3′ ends not matched/total number of bases in the query sequence) so 10% is subtracted from the percent identity score calculated by the FASTDB program. If the remaining 90 bases were perfectly matched the final percent identity would be 90%. In another example, a 90 base subject sequence is compared with a 100 base query sequence. This time the deletions are internal deletions so that there are no bases on the 5′ or 3′ of the subject sequence which are not matched/aligned with the query. In this case the percent identity calculated by FASTDB is not manually corrected. Once again, only bases 5′ and 3′ of the subject sequence which are not matched/aligned with the query sequence are manually corrected for. No other manual corrections are to be made for the purposes of the present invention.

[0104] By a polypeptide having an amino acid sequence at least, for example, 95% “identical” to a query amino acid sequence of the present invention, it is intended that the amino acid sequence of the subject polypeptide is identical to the query sequence except that the subject polypeptide sequence may include up to five amino acid alterations per each 100 amino acids of the query amino acid sequence. In other words, to obtain a polypeptide having an amino acid sequence at least 95% identical to a query amino acid sequence, up to 5% of the amino acid residues in the subject sequence may be inserted, deleted, (indels) or substituted with another amino acid. These alterations of the reference sequence may occur at the′ amino or carboxy terminal positions of the reference amino acid sequence or anywhere between those terminal positions, interspersed either individually among residues in the reference sequence or in one or more contiguous groups within the reference sequence.

[0105] As a practical matter, whether any particular polypeptide is at least 80%, 85%, 90%, 95%, 96%, 97%, 98% or 99% identical to, for instance, the amino acid sequence of a polypeptide referred to in Table 1A (e.g., the amino acid sequence identified in column 6) or Table 2 (e.g., the amino acid sequence of the polypeptide encoded by the polynucleotide sequence defined in columns 8 and 9 of Table 2) or a fragment thereof, the amino acid sequence of the polypeptide encoded by the polynucleotide sequence in SEQ ID NO:B as defined in column 6 of Table 1B or a fragment thereof, the amino acid sequence of the polypeptide encoded by the nucleotide sequence in SEQ ID NO:X or a fragment thereof, or the amino acid sequence of the polypeptide encoded by cDNA contained in Clone ID NO:Z, or a fragment thereof, can be determined conventionally using known computer programs. A preferred method for determining the best overall match between a query sequence (a sequence of the present invention) and a subject sequence, also referred to as a global sequence alignment, can be determined using the FASTDB computer program based on the algorithm of Brutlag et al. (Comp. App. Biosci.6:237-245 (1990)). In a sequence alignment the query and subject sequences are either both nucleotide sequences or both amino acid sequences. The result of said global sequence alignment is expressed as percent identity. Preferred parameters used in a FASTDB amino acid alignment are: Matrix=PAM 0, k-tuple=2, Mismatch Penalty=1, Joining Penalty=20, Randomization Group.Length=0, Cutoff Score=1, Window Size=sequence length, Gap Penalty=5, Gap Size Penalty=0.05, Window Size=500 or the length of the subject amino acid sequence, whichever is shorter.

[0106] If the subject sequence is shorter than the query sequence due to N- or C-terminal deletions, not because of internal deletions, a manual correction must be made to the results. This is because the FASTDB program does not account for N- and C-terminal truncations of the subject sequence when calculating global percent identity. For subject sequences truncated at the N- and C-termini, relative to the query sequence, the percent identity is corrected by calculating the number of residues of the query sequence that are N- and C-terminal of the subject sequence, which are not matched/aligned with a corresponding subject residue, as a percent of the total bases of the query sequence. Whether a residue is matched/aligned is determined by results of the FASTDB sequence alignment. This percentage is then subtracted from the percent identity, calculated by the above FASTDB program using the specified parameters, to arrive at a final percent identity score. This final percent identity score is what is used for the purposes of the present invention. Only residues to the N- and C-termini of the subject sequence, which are not matched/aligned with the query sequence, are considered for the purposes of manually adjusting the percent identity score. That is, only query residue positions outside the farthest N- and C-terminal residues of the subject sequence.

[0107] For example, a 90 amino acid residue subject sequence is aligned with a 100 residue query sequence to determine percent identity. The deletion occurs at-the N-terminus of the subject sequence and therefore, the FASTDB alignment does not show a matching/alignment of the first 10 residues at the N-terminus. The 10 unpaired residues represent 10% of the sequence (number of residues at the N- and C-termini not matched/total number of residues in the query sequence) so 10% is subtracted from the percent identity score calculated by the FASTDB program. If the remaining 90 residues were perfectly matched the final percent identity would be 90%. In another example, a 90 residue subject sequence is compared with a 100 residue query sequence. This time the deletions are internal deletions so there are no residues at the N- or C-termini of the subject sequence which are not matched/aligned with the query. In this case the percent identity calculated by FASTDB is not manually corrected. Once again, only residue positions outside the N- and C-terminal ends of the subject sequence, as displayed in the FASTDB alignment, which are not matched/aligned with the query sequnce are manually corrected for. No other manual corrections are to made for the purposes of the present invention.

[0108] The polynucleotide variants of the invention may contain alterations in the coding regions, non-coding regions, or both. Especially preferred are polynucleotide variants containing alterations which produce silent substitutions, additions, or deletions, but do not alter the properties or activities of the encoded polypeptide. Nucleotide variants produced by silent substitutions due to the degeneracy of the genetic code are preferred. Moreover, polypeptide variants in which less than 50, less than 40, less than 30, less than 20, less than 10, or 5-50, 5-25, 5-10, 1-5, or 1-2 amino acids are substituted, deleted, or added in any combination are also preferred. Polynucleotide variants can be produced for a variety of reasons, e.g., to optimize codon expression for a particular host (change codons in the human mRNA to those preferred by a bacterial host such as E. coli).

[0109] Naturally occurring variants are called “allelic variants,” and refer to one of several alternate forms of a gene occupying a given locus on a chromosome of an organism. (Genes II, Lewin, B., ed., John Wiley & Sons, New York (1985)). These allelic variants can vary at either the polynucleotide and/or polypeptide level and are included in the present invention. Alternatively, non-naturally occurring variants may be produced by mutagenesis techniques or by direct synthesis.

[0110] Using known methods of protein engineering and recombinant DNA technology, variants may be generated to improve or alter the characteristics of the polypeptides of the present invention. For instance, one or more amino acids can be deleted from the N-terminus or C-terminus of the polypeptide of the present invention without substantial loss of biological function. As an example, Ron et al. (J. Biol. Chem. 268: 2984-2988 (1993)) reported variant KGF proteins having heparin binding activity even after deleting 3, 8, or 27 amino-terminal amino acid residues. Similarly, Interferon gamma exhibited up to ten times higher activity after deleting 8-10 amino acid residues from the carboxy terminus of this protein. (Dobeli et al., J. Biotechnology 7:199-216 (1988).)

[0111] Moreover, ample evidence demonstrates that variants often retain a biological activity similar to that of the naturally occurring protein. For example, Gayle and coworkers (J. Biol. Chem. 268:22105-22111 (1993)) conducted extensive mutational analysis of human cytokine IL-1a. They used random mutagenesis to generate over 3,500 individual IL-1a mutants that averaged 2.5 amino acid changes per variant over the entire length of the molecule. Multiple mutations were examined at every possible amino acid position. The investigators found that “[m]ost of the molecule could be altered with little effect on either [binding or biological activity].” In fact, only 23 unique amino acid sequences, out of more than 3,500 nucleotide sequences examined, produced a protein that significantly differed in activity from wild-type.

[0112] Furthermore, even if deleting one or more amino acids from the N-terminus or C-terminus of a polypeptide results in modification or loss of one or more biological functions, other biological activities may still be retained. For example, the ability of a deletion variant to induce and/or to bind antibodies which recognize the secreted form will likely be retained when less than the majority of the residues of the secreted form are removed from the N-terminus or C-terminus. Whether a particular polypeptide lacking N- or C-terminal residues of a protein retains such immunogenic activities can readily be determined by routine methods described herein and otherwise known in the art.

[0113] Thus, the invention further includes polypeptide variants which show a functional activity (e.g., biological activity) of the polypeptides of the invention. Such variants include deletions, insertions, inversions, repeats, and substitutions selected according to general rules known in the art so as have little effect on activity.

[0114] The present application is directed to nucleic acid molecules at least 80%, 85%, 90%, 95%, 96%, 97%, 98%, 99% or 100% identical to the nucleic acid sequences disclosed herein, (e.g., encoding a polypeptide having the amino acid sequence of an N and/or C terminal deletion), irrespective of whether they encode a polypeptide having functional activity. This is because even where a particular nucleic acid molecule does not encode a polypeptide having functional activity, one of skill in the art would still know how to use the nucleic acid molecule, for instance, as a hybridization probe or a polymerase chain reaction (PCR) primer. Uses of the nucleic acid molecules of the present invention that do not encode a polypeptide having functional activity include, inter alia, (1) isolating a gene or allelic or splice variants thereof in a cDNA library; (2) in situ hybridization (e.g., “FISH”) to metaphase chromosomal spreads to provide precise chromosomal location of the gene, as described in Verma et al., Human Chromosomes: A Manual of Basic Techniques, Pergamon Press, New York (1988); (3) Northern Blot analysis for detecting mRNA expression in specific tissues (e.g., normal or diseased tissues); and (4) in situ hybridization (e.g., histochemistry) for detecting mRNA expression in specific tissues (e.g., normal or diseased tissues).

[0115] Preferred, however, are nucleic acid molecules having sequences at least 80%, 85%, 90%, 95%, 96%, 97%, 98%, 99% or 100% identical to the nucleic acid sequences disclosed herein, which do, in fact, encode a polypeptide having functional activity. By a polypeptide having “functional activity” is meant, a polypeptide capable of displaying one or more known functional activities associated with a full-length (complete) protein of the invention. Such functional activities include, but are not limited to, biological activity, antigenicity [ability to bind (or compete with a polypeptide of the invention for binding) to an anti-polypeptide of the invention antibody], immunogenicity (ability to generate antibody which binds to a specific polypeptide of the invention), ability to form multimers with polypeptides of the invention, and ability to bind to a receptor or ligand for a polypeptide of the invention.

[0116] The functional activity of the polypeptides, and fragments, variants and derivatives of the invention, can be assayed by various methods.

[0117] For example, in one embodiment where one is assaying for the ability to bind or compete with a full-length polypeptide of the present invention for binding to an anti-polypetide antibody, various immunoassays known in the art can be used, including but not limited to, competitive and non-competitive assay systems using techniques such as radioimmunoassays, ELISA (enzyme linked immunosorbent assay), “sandwich” immunoassays, immunoradiometric assays, gel diffusion precipitation reactions, immunodiffusion assays, in situ immunoassays (using colloidal gold, enzyme or radioisotope labels, for example), western blots, precipitation reactions, agglutination assays (e.g., gel agglutination assays, hemagglutination assays), complement fixation assays, immunofluorescence assays, protein A assays, and immunoelectrophoresis assays, etc. In one embodiment, antibody binding is detected by detecting a label on the primary antibody. In another embodiment, the primary antibody is detected by detecting binding of a secondary antibody or reagent to the primary antibody. In a further embodiment, the secondary antibody is labeled. Many means are known in the art for detecting binding in an immunoassay and are within the scope of the present invention.

[0118] In another embodiment, where a ligand is identified, or the ability of a polypeptide fragment, variant or derivative of the invention to multimerize is being evaluated, binding can be assayed, e.g., by means well-known in the art, such as, for example, reducing and non-reducing gel chromatography, protein affinity chromatography, and affinity blotting. See generally, Phizicky et al., Microbiol. Rev. 59:94-123 (1995). In another embodiment, the ability of physiological correlates of a polypeptide of the present invention to bind to a substrate(s) of the polypeptide of the invention can be routinely assayed using techniques known in the art.

[0119] In addition, assays described herein (see Examples) and otherwise known in the art may routinely be applied to measure the ability of polypeptides of the present invention and fragments, variants and derivatives thereof to elicit polypeptide related biological activity (either in vitro or in vivo). Other methods will be known to the skilled artisan and are within the scope of the invention.

[0120] Of course, due to the degeneracy of the genetic code, one of ordinary skill in the art will immediately recognize that a large number of the nucleic acid molecules having a sequence at least 80%, 85%, 90%, 95%, 96%, 97%, 98%, 99%, or 100% identical to, for example, the nucleic acid sequence of the cDNA contained in Clone ID NO:Z, the nucleic acid sequence referred to in Table 1A (SEQ ID NO:X), the nucleic acid sequence disclosed in Table 2 (e.g,. the nucleic acid sequence delineated in columns 8 and 9) or fragments thereof, will encode polypeptides “having functional activity.” In fact, since degenerate variants of any of these nucleotide sequences all encode the same polypeptide, in many instances, this will be clear to the skilled artisan even without performing the above described comparison assay. It will be further recognized in the art that, for such nucleic acid molecules that are not degenerate variants, a reasonable number will also encode a polypeptide having functional activity. This is because the skilled artisan is fully aware of amino acid substitutions that are either less likely or not likely to significantly effect protein function (e.g., replacing one aliphatic amino acid with a second aliphatic amino acid), as further described below.

[0121] For example, guidance concerning how to make phenotypically silent amino acid substitutions is provided in Bowie et al., “Deciphering the Message in Protein Sequences: Tolerance to Amino Acid Substitutions,” Science 247:1306-1310 (1990), wherein the authors indicate that there are two main strategies for studying the tolerance of an amino acid sequence to change.

[0122] The first strategy exploits the tolerance of amino acid substitutions by natural selection during the process of evolution. By comparing amino acid sequences in different species, conserved amino acids can be identified. These conserved amino acids are likely important for protein function. In contrast, the amino acid positions where substitutions have been tolerated by natural selection indicates that these positions are not critical for protein function. Thus, positions tolerating amino acid substitution could be modified while still maintaining biological activity of the protein.

[0123] The second strategy uses genetic engineering to introduce amino acid changes at specific positions of a cloned gene to identify regions critical for protein function. For example, site directed mutagenesis or alanine-scanning mutagenesis (introduction of single alanine mutations at every residue in the molecule) can be used. See Cunningham and Wells, Science 244:1081-1085 (1989). The resulting mutant molecules can then be tested for biological activity.

[0124] As the authors state, these two strategies have revealed that proteins are surprisingly tolerant of amino acid substitutions. The authors further indicate which amino acid changes are likely to be permissive at certain amino acid positions in the protein. For example, most buried (within the tertiary structure of the protein) amino acid residues require nonpolar side chains, whereas few features of surface side chains are generally conserved. Moreover, tolerated conservative amino acid substitutions involve replacement of the aliphatic or hydrophobic amino acids Ala, Val, Leu and Ile; replacement of the hydroxyl residues Ser and Thr; replacement of the acidic residues Asp and Glu; replacement of the amide residues Asn and Gln, replacement of the basic residues Lys, Arg, and His; replacement of the aromatic residues Phe, Tyr, and Trp, and replacement of the small-sized amino acids Ala, Ser, Thr, Met, and Gly. Besides conservative amino acid substitution, variants of the present invention include (i) substitutions with one or more of the non-conserved amino acid residues, where the substituted amino acid residues may or may not be one encoded by the genetic code, or (ii) substitutions with one or more of the amino acid residues having a substituent group, or (iii) fusion of the mature polypeptide with another compound, such as a compound to increase the stability and/or solubility of the polypeptide (for example, polyethylene glycol), (iv) fusion of the-polypeptide with additional amino acids, such as, for example, an IgG Fc fusion- region peptide, serum albumin (preferably human serum albumin) or a fragment thereof, or leader or secretory sequence, or a sequence facilitating purification, or (v) fusion of the polypeptide with another compound, such as albumin (including but not limited to recombinant albumin (see, e.g., U.S. Pat. No. 5,876,969, issued Mar. 2, 1999, EP Pat. 0 413 622, and U.S. Pat. No. 5,766,883, issued Jun. 16, 1998, herein incorporated by reference in their entirety)). Such variant polypeptides are deemed to be within the scope of those skilled in the art from the teachings herein.

[0125] For example, polypeptide variants containing amino acid substitutions of charged amino acids with other charged or neutral amino acids may produce proteins with improved characteristics, such as less aggregation. Aggregation of pharmaceutical formulations both reduces activity and increases clearance due to the aggregate's immunogenic activity. See Pinckard et al., Clin. Exp. Immunol. 2:331-340 (1967); Robbins et al., Diabetes 36: 838-845 (1987); Cleland et al., Crit. Rev. Therapeutic Drug Carrier Systems 10:307-377 (1993).

[0126] A further embodiment of the invention relates to polypeptides which comprise the amino acid sequence of a polypeptide having an amino acid sequence which contains at least one amino acid substitution, but not more than 50 amino acid substitutions, even more preferably, not more than 40 amino acid substitutions, still more preferably, not more than 30 amino acid substitutions, and still even more preferably, not more than 20 amino acid substitutions from a polypeptide sequence disclosed herein. Of course it is highly preferable for a polypeptide to have an amino acid sequence which comprises the amino acid sequence of a polypeptide of SEQ ID NO:Y, an amino acid sequence encoded by SEQ ID NO:X, an amino acid sequence encoded by the portion of SEQ ID NO:X as defined in columnns 8 and 9 of Table 2, an amino acid sequence encoded by the complement of SEQ ID NO:X, and/or an amino acid sequence encoded by cDNA contained in Clone ID NO:Z which contains, in order of ever-increasing preference, at least one, but not more than 10, 9, 8, 7, 6, 5, 4, 3, 2 or 1 amino acid substitutions.

[0127] In specific embodiments, the polypeptides of the invention comprise, or alternatively, consist of, fragments or variants of a reference amino acid sequence selected from: (a) the amino acid sequence of SEQ ID NO:Y or fragments thereof (e.g., the mature form and/or other fragments described herein); (b) the amino acid sequence encoded by SEQ ID NO:X or fragments thereof; (c) the amino acid sequence encoded by the complement of SEQ ID NO:X or fragments thereof; (d) the amino acid sequence encoded by the portion of SEQ ID NO:X as defined in columns 8 and 9 of Table 2 or fragments thereof; and (e) the amino acid sequence encoded by cDNA contained in Clone ID NO:Z or fragments thereof; wherein the fragments or variants have 1-5, 5-10, 5-25, 5-50, 10-50 or 50-150, amino acid residue additions, substitutions, and/or deletions when compared to the reference amino acid sequence. In preferred embodiments, the amino acid substitutions are conservative. Polynucleotides encoding these polypeptides are also encompassed by the invention.

[0128] Polynucleotide and Polypeptide Fragments

[0129] The present invention is also directed to polynucleotide fragments of the polynucleotides (nucleic acids) of the invention. In the present invention, a “polynucleotide fragment” refers to a polynucleotide having a nucleic acid sequence which, for example: is a portion of the cDNA contained in Clone ID NO:Z or the complementary strand thereto; is a portion of the polynucleotide sequence encoding the polypeptide encoded by the cDNA contained in Clone ID NO:Z or the complementary strand thereto; is a portion of a polynucleotide sequence encoding the amino acid sequence encoded by the region of SEQ ID NO:X as defined in columns 8 and 9 of Table 2 or the complementary strand thereto; is a portion of the polynucleotide sequence of SEQ ID NO:X as defined in columns 8 and 9 of Table 2 or the complementary strand thereto; is a portion of the polynucleotide sequence in SEQ ID NO:X or the complementary-strand thereto; is a polynucleotide sequence encoding a portion of the polypeptide of SEQ ID NO:Y; is a polynucleotide sequence encoding a portion of a polypeptide encoded by SEQ ID NO:X; is a polynucleotide sequence encoding a portion of a polypeptide encoded by the complement of the polynucleotide sequence in SEQ ID NO:X; is a portion of a polynucleotide sequence encoding the amino acid sequence encoded by the region. of SEQ ID NO:B as defined in column 6 of Table 1B or the complementary strand thereto; or is a portion of the polynucleotide sequence of SEQ ID NO:B as defined in column 6 of Table 1B or the complementary strand thereto.

[0130] The polynucleotide fragments of the invention are preferably at least about 15 nt, and more preferably at least about 20 nt, still more preferably at least about 30 nt, and even more preferably, at least about 40 nt, at least about 50 nt, at least about 75 nt, or at least about 150 nt in length. A fragment “at least 20 nt in length,” for example, is intended to include 20 or more contiguous bases from the cDNA sequence contained in Clone ID NO:Z, or the nucleotide sequence shown in SEQ ID NO:X or the complementary stand thereto. In this context “about” includes the particularly recited value or a value larger or smaller by several (5, 4, 3, 2, or 1) nucleotides, at either terminus or at both termini. These nucleotide fragments have uses that include, but are not limited to, as diagnostic probes and primers as discussed herein. Of course, larger fragments (e.g., at least 160, 170, 180, 190, 200, 250, 500, 600, 1000, or 2000 nucleotides in length) are also encompassed by the invention.

[0131] Moreover, representative examples of polynucleotide fragments of the invention comprise, or alternatively consist of, a sequence from about nucleotide number 1-50, 51-100, 101-150, 151-200, 201-250, 251-300, 301-350, 351-400, 401-450, 451-500, 501-550, 551-600, 601-650, 651-700, 701-750, 751-800, 801-850, 851-900, 901-950, 951-1000, 1001-1050, 1051-1100, 1101-1150, 1151-1200, 1201-1250, 1251-1300, 1301-1350, 1351-1400, 1401-1450, 1451-1500, 1501-1550, 1551-1600, 1601-1650, 1651-1700, 1701-1750, 1751-1800, 1901-1850, 1851-1900, 1901-1950, 1951-2000, 2001-2050, 2051-2100, 2101-2150, 2151-2200, 2201-2250, 2251-2300, 2301-2350, 2351-2400, 2401-2450, 2451-2500, 2501-2550, 2551-2600, 2601-2650, 2651-2700, 2701-2750, 2751-2800, 2801-2850, 2851-2900, 2901-2950, 2951-3000, 3001-3050, 3051-3100, 3101-3150, 3151-3200, 3201-3250, 3251-3300, 3301-3350, 3351-3400, 3401-3450, 3451-3500, 3501-3550, 3551-3600, 3601-3650, 3651-3700, 3701-3750, 3751-3800, 3801-3850, 3851-3900, 3901-3950, 3951-4000, 4001-4050, 4051-4100, 4101-4150, 4151-4200, 4201-4250, 4251-4300, 4301-4350, 4351-4400, 4401-4450, 4451-4500, 4501-4550, 4551-4600, 4601-4650, 4651-4700, 4701-4750, 4751-4800, 4801-4850, 4851-4900, 4901-4950, 4951-5000, 5001-5050, 5051-5100, 5101-5150, 5151-5200, 5201-5250, 5251-5300, 5301-5350, 5351-5400, 5401-5450, 5451-5500, 5501-5550, 5551-5600, 5601-5650, 5651-5700, 5701-5750, 5751-5800, 5801-5850, 5851-5900, 5901-5950, 5951-6000, 6001-6050, 6051-6100, 6101-6150, 6151-6200, 6201-6250, 6251-6300, 6301-6350, 6351-6400, 6401-6450, 6451-6500, 6501-6550, 6551-6600, 6601-6650, 6651-6700, 6701-6750, 6751-6800, 6801-6850, 6851-6900, 6901-6950, 6951-7000, 7001-7050, 7051-7100, 7101-7150, 7151-7200, 7201-7250, 7251-7300 or 7301 to the end of SEQ ID NO:X, or the complementary strand thereto. In this context “about” includes the particularly recited range or a range larger or smaller by several (5, 4, 3, 2, or 1) nucleotides, at either terminus or at both termini. Preferably, these fragments encode a polypeptide which has a functional activity (e.g., biological activity). More preferably, these polynucleotides can be used as probes or primers as discussed herein. Polynucleotides which hybridize to one or more of these polynucleotides under stringent hybridization conditions or alternatively, under lower stringency conditions are also encompassed by the invention, as are polypeptides encoded by these polynucleotides.

[0132] Further representative examples of polynucleotide fragments of the invention comprise, or alternatively consist of, a sequence from about nucleotide number 1-50, 51-100, 101-150, 151-200, 201-250, 251-300, 301-350, 351-400, 401-450, 451-500, 501-550, 551-600, 601-650, 651-700, 701-750, 751-800, 801-850, 851-900, 901-950, 951-1000, 1001-1050, 1051-1100, 1101-1150, 1151-1200, 1201-1250, 1251-1300, 1301-1350, 1351-1400, 1401-1450, 1451-1500, 1501-1550, 1551-1600, 1601-1650, 1651-1700, 1701-1750, 1751-1800, 1801-1850, 1851-1900, 1901-1950, 1951-2000, 2001-2050, 2051-2100, 2101-2150, 2151-2200, 2201-2-250, 2251-2300, 2301-2350, 2351-2400, 2401-2450, 2451-2500, 2501-2550, 2551-2600, 2601-2650, 2651-2700, 2701-2750, 2751-2800, 2801-2850, 2851-2900, 2901-2950, 2951-3000, 3001-3050, 3051-3100, 3101-3150, 3151-3200, 3201-3250, 3251-3300, 3301-3350, 3351-3400, 3401-3450, 3451-3500, 3501-3550, 3551-3600, 3601-3650, 3651-3700, 3701-3750, 3751-3800, 3801-3850, 3851-3900, 3901-3950, 3951-4000, 4001-4050, 4051-4100, 4101-4150, 4151-4200, 4201-4250, 4251-4300, 4301-4350, 4351-4400, 4401-4450, 4451-4500, 4501-4550, 4551-4600, 4601-4650, 4651-4700, 4701-4750, 4751-4800, 4801-4850, 4851-4900, 4901-4950, 4951-5000, 5001-5050, 5051-5100, 5101-5150, 5151-5200, 5201-5250, 5251-5300, 5301-5350, 5351-5400, 5401-5450, 5451-5500, 5501-5550, 5551-5600, 5601-5650, 5651-5700, 5701-5750, 5751-5800, 5801-5850, 5851-5900, 5901-5950, 5951-6000, 6001-6050, 6051-6100, 6101-6150, 6151-6200, 6201-6250, 6251-6300, 6301-6350, 6351-6400, 6401-6450, 6451-6500, 6501-6550, 6551-6600, 6601-6650, 6651-6700, 6701-6750, 6751-6800, 6801-6850, 6851-6900, 6901-6950, 6951-7000, 7001-7050, 7051-7100, 7101-7150, 7151-7200, 7201-7250, 7251-7300 or 7301 to the end of the cDNA sequence contained in Clone ID NO:Z, or the complementary strand thereto. In this context “about” includes the particularly recited range or a range larger or smaller by several (5, 4, 3, 2, or 1) nucleotides, at either terminus or at both termini. Preferably, these fragments encode a polypeptide which has a functional activity (e.g., biological activity). More preferably, these polynucleotides can be used as probes or primers as discussed herein. Polynucleotides which hybridize to one or more of these polynucleotides under stringent hybridization conditions or alternatively, under lower stringency conditions are also encompassed by the invention, as are polypeptides encoded by these polynucleotides.

[0133] Moreover, representative examples of polynucleotide fragments of the invention comprise, or alternatively consist of, a nucleic acid sequence comprising one, two, three, four, five, six, seven, eight, nine, ten, or more of the above described polynucleotide fragments of the invention in combination with a polynucleotide sequence delineated in Table 1B column 6. Additional, representative examples of polynucleotide fragments of the invention comprise, or alternatively consist of, a nucleic acid sequence comprising one, two, three, four, five, six, seven, eight, nine, ten, or more of the above described polynucleotide fragments of the invention in combination with a polynucleotide sequence that is the complementary strand of a sequence delineated in column 6 of Table 1B. In further embodiments, the above-described polynucleotide fragments of the invention comprise, or alternatively consist of, sequences delineated in Table 1B, column 6, and have a nucleic acid sequence which is different from that of the BAC fragment having the sequence disclosed in SEQ ID NO:B (see Table 1B, column 5). In additional embodiments, the above-described polynucleotide fragments of the invention comprise, or alternatively consist of, sequences delineated in Table 1B, column 6, and have a nucleic acid sequence which is different from that published for the BAC clone identified as BAC ID NO:A (see Table 1B, column 4). In additional embodiments, the above-described polynucleotides of the invention comprise, or alternatively consist of, sequences delineated Table 1B, column 6, and have a nucleic acid sequence which is different from that contained in the BAC clone identified as BAC ID NO:A (see Table 1B, column 4). Polypeptides encoded by these polynucleotides, other polynucleotides that encode these polypeptides, and antibodies that bind these polypeptides are also encompassed by the invention. Additionally, fragments and variants of the above-described polynucleotides and polypeptides are also encompassed by the invention.

[0134] In additional specific embodiments, polynucleotides of the invention comprise, or alternatively consist of, one, two, three, four, five, six, seven, eight, nine, ten, or more fragments of the sequences delineated in column 6 of Table 1B, and the polynucleotide sequence of SEQ ID NO:X (e.g., as defined in Table 1B, column 2) or fragments or variants thereof. Polypeptides encoded by these polynucleotides, other polynucleotides that encode these polypeptides, and antibodies that bind these polypeptides are also encompassed by the invention.

[0135] In additional specific embodiments, polynucleotides of the invention comprise, or alternatively consist of, one, two, three, four, five, six, seven, eight, nine, ten, or more fragments of the sequences delineated in column 6 of Table 1B which correspond to the same Clone ID NO:Z (see Table 1B, column 1), and the polynucleotide sequence of SEQ ID NO:X (e.g., as defined in Table 1A or 1B) or fragments or variants thereof. Polypeptides encoded by these polynucleotides, other polynucleotides that encode these polypeptides, and antibodies that bind these polypeptides are also encompassed by the invention.

[0136] In further specific embodiments, polynucleotides of the invention comprise, or alternatively consist of, one, two, three, four, five, six, seven, eight, nine, ten, or more fragments of the sequences delineated in the same row of column 6 of Table 1B, and the polynucleotide sequence of SEQ ID NO:X (e.g., as defined in Table 1A or 1B) or fragments or variants thereof. Polypeptides encoded by these polynucleotides, other polynucleotides that encode these polypeptides, and antibodies that bind these polypeptides are also encompassed by the invention.

[0137] In additional specific embodiments, polynucleotides of the invention comprise, or alternatively consist of a polynucleotide sequence in which the 3′ 10 polynucleotides of one of the sequences delineated in column 6 of Table 1B and the 5′ 10 polynucleotides of the sequence of SEQ ID NO:X are directly contiguous. Nucleic acids which hybridize to the complement of these 20 contiguous polynucleotides under stringent hybridization conditions or alternatively, under lower stringency conditions, are also encompassed by the invention. Polypeptides encoded by these polynucleotides and/or nucleic acids, other polynucleotides and/or nucleic acids that encode these polypeptides, and antibodies that bind these polypeptides are also encompassed by the invention. Additionally, fragments and variants of the above-described polynucleotides, nucleic acids, and polypeptides are also encompassed by the invention.

[0138] In additional specific embodiments, polynucleotides of the invention comprise, or alternatively consist of a polynucleotide sequence in which the 3′ 10 polynucleotides of one of the sequences delineated in column 6 of Table 1B and the 5′ 10 polynucleotides of a fragment or variant of the sequence of SEQ ID NO:X (e.g., as described herein) are directly contiguous Nucleic acids which hybridize to the complement of these 20 contiguous polynucleotides under stringent hybridization conditions or alternatively, under lower stringency conditions, are also encompassed by the invention. Polypeptides encoded by these polynucleotides and/or nucleic acids, other polynucleotides and/or nucleic acids encoding these polypeptides, and antibodies that bind these polypeptides are also encompassed by the invention. Additionally, fragments and variants of the above-described polynucleotides, nucleic acids, and polypeptides are also encompassed by the invention.

[0139] In further specific embodiments, polynucleotides of the invention comprise, or alternatively consist of a polynucleotide sequence in which the 3′ 10 polynucleotides of a fragment or variant of the sequence of SEQ ID NO:X and the 5′ 10 polynucleotides of the sequence of one of the sequences delineated in column 6 of Table 1B are directly contiguous. Nucleic acids which hybridize to the complement of these 20 contiguous polynucleotides under stringent hybridization conditions or alternatively, under lower stringency conditions, are also encompassed by the invention. Polypeptides encoded by these polynucleotides and/or nucleic acids, other polynucleotides and/or nucleic acids encoding these polypeptides, and antibodies that bind these polypeptides are also encompassed by the invention. Additionally, fragments and variants of the above-described polynucleotides, nucleic acids, and polypeptides are also encompassed by the invention.

[0140] In specific embodiments, polynucleotides of the invention comprise, or alternatively consist of a polynucleotide sequence in which the 3′ 10 polynucleotides of one of the sequences delineated in column 6 of Table 1B and the 5′ 10 polynucleotides of another sequence in column 6 are directly contiguous. In preferred embodiments, the 3′ 10 polynucleotides of one of the sequences delineated in column 6 of Table 1B is directly contiguous with the 5′ 10 polynucleotides of the next sequential exon delineated in Table 1B, column 6. Nucleic acids which hybridize to the complement of these 20 contiguous polynucleotides under stringent hybridization conditions or alternatively, under lower stringency conditions, are also encompassed by the invention. Polypeptides encoded by these polynucleotides and/or nucleic acids, other polynucleotides and/or nucleic acids encoding these polypeptides, and antibodies that bind these polypeptides are also encompassed by the invention. Additionally, fragments and variants of the above-described polynucleotides, nucleic acids, and polypeptides are also encompassed by the invention.

[0141] In the present invention, a “polypeptide fragment” refers to an amino acid sequence which is a portion of that contained in SEQ ID NO:Y, a portion of an amino acid sequence encoded by the portion of SEQ ID NO:X as defined in columnns 8 and 9 of Table 2, a portion of an amino acid sequence encoded by the polynucleotide sequence of SEQ ID NO:X, a portion of an amino acid sequence encoded by the complement of the polynucleotide sequence in SEQ ID NO:X, and/or a portion of an amino acid sequence encoded by the cDNA contained in Clone ID NO:Z. Protein (polypeptide) fragments may be “free-standing,” or comprised within a larger polypeptide of which the fragment forms a part or region, most preferably as a single continuous region. Representative examples of polypeptide fragments of the invention, include, for example, fragments comprising, or alternatively consisting of, from about amino acid number 1-20, 21-40, 41-60, 61-80, 81-100, 101-120, 121-140, 141-160, 161-180, 181-200, 201-220, 221-240, 241-260, 261-280, 281-300, 301-320, 321-340, 341-360, 361-380, 381-400, 401-420, 421-440, 441-460, 461-480, 481-500, 501-520, 521-540, 541-560, 561-580, 581-600, 601-620, 621-640, 641-660, 66-1-680, 681-700, 701-720, 721-740, 741-760, 761-780, 781-800, 801-820, 821-840, 841-860, 861-880, 881-900, 901-920, 921-940, 941-960, 961-980, 981-1000, 1001-1020, 1021-1040, 1041-1060, 1061-1080, 1081-1100, 1101-1120, 1121-1140, 1141-1160, 1161-1180, 1181-1200, 1201-1220, 1221-1240, 1241-1260, 1261-1280, 1281-1300, 1301-1320, 1321-1340, 1341-1360, 1361-1380, 1381-1400, 1401-1420, 1421-1440, or 1441 to the end of the coding region of cDNA and SEQ ID NO: Y. In a preferred embodiment, polypeptide fragments of the invention include, for example, fragments comprising, or alternatively consisting of, from about amino acid number 1-20, 21-40, 41-60, 61-80, 81-100, 101-120, 121-140, 141-160, 161-180, 181-200, 201-220, 221-240, 241-260, 261-280, 281-300, 301-320, 321-340, 341-360, 361-380, 381-400, 401-420, 421-440, 441-460, 461-480, 481-500, 501-520, 521-540, 541-560, 561-580, 581-600, 601-620, 621-640, 641-660, 661-680, 681-700, 701-720, 721-740, 741-760, 761-780, 781-800, 801-820, 821-840, 841-860, 861-880, 881-900, 901-920, 921-940, 941-960, 961-980, 981-1000, 1001-1020, 1021-1040, 1041-1060, 1061-1080, 1081-1100, 1101-1120, 1121-1140, 1141-1160, 1161-1180, 1181-1200, 1201-1220, 1221-1240, 1241-1260, 1261-1280, 1281-1300, 1301-1320, 1321-1340, 1341-1360, 1361-1380, 1381-1400, 1401-1420, 1421-1440, or 1441 to the end of the coding region of SEQ ID NO:Y. Moreover, polypeptide fragments of the invention may be at least about 10, 15, 20, 25, 30, 35, 40, 45, 50, 55, 60, 65, 70, 75, 80, 85, 90, 100, 110, 120, 130, 140, or 150 amino acids in length. In this context “about” includes the particularly recited ranges or values, or ranges or values larger or smaller by several (5, 4, 3, 2, or 1) amino acids, at either extreme or at both extremes. Polynucleotides encoding these polypeptide fragments are also encompassed by the invention.

[0142] Even if deletion of one or more amino acids from the N-terminus of a protein results in modification of loss of one or more biological functions of the protein, other functional activities (e.g., biological activities, ability to multimerize, ability to bind a ligand) may still be retained. For example, the ability of shortened muteins to induce and/or bind to antibodies which recognize the complete or mature forms of the polypeptides generally will be retained when less than the majority of the residues of the complete or mature polypeptide are removed from the N-terminus. Whether a particular polypeptide lacking N-terminal residues of a complete polypeptide retains such immunologic activities can readily be determined by routine methods described herein and otherwise known in the art. It is not unlikely that a mutein with a large number of deleted N-terminal amino acid residues may retain some biological or immunogenic activities. In fact, peptides composed of as few as six amino acid residues may often evoke an immune response.

[0143] Accordingly, polypeptide fragments include the secreted protein as well as the mature form. Further preferred polypeptide fragments include the secreted protein or the mature form having a continuous series of deleted residues from the amino or the carboxy terminus, or both. For example, any number of amino acids, ranging from 1-60, can be deleted from the amino terminus of either the secreted polypeptide or the mature form. Similarly, any number of amino acids, ranging from 1-30, can be deleted from the carboxy terminus of the secreted protein or mature form. Furthermore, any combination of the above amino and carboxy terminus deletions are preferred. Similarly, polynucleotides encoding these polypeptide fragments are also preferred.

[0144] The present invention further provides polypeptides having one or more residues deleted from the amino terminus of the amino acid sequence of a polypeptide disclosed herein (e.g., a polypeptide of SEQ ID NO:Y, a polypeptide encoded by the polynucleotide sequence contained in SEQ ID NO:X or the complement thereof, a polypeptide encoded by the portion of SEQ ID NO:X as defined in columns 8 and 9 of Table 2, a polypeptide encoded by the portion of SEQ ID NO:B as defined in column 6 of Table 1B, and/or a polypeptide encoded by the cDNA contained in Clone ID NO:Z). In particular, N-terminal deletions may be described by the general formula m-q, where q is a whole integer representing the total number of amino acid residues in a polypeptide of the invention (e.g., the polypeptide disclosed in SEQ ID NO:Y, or the polypeptide encoded by the portion of SEQ ID NO:X as defined in columns 8 and 9 of Table 2), and m is defined as any integer ranging from 2 to q-6. Polynucleotides encoding these polypeptides are also encompassed by the invention.

[0145] The present invention further provides polypeptides having one or more residues from the carboxy terminus of the amino acid sequence of a polypeptide disclosed herein (e.g., a polypeptide of SEQ ID NO:Y, a polypeptide encoded by the polynucleotide sequence contained in SEQ ID NO:X, a polypeptide encoded by the portion of SEQ ID NO:X as defined in columns 8 and 9 of Table 2, and/or a polypeptide encoded by the cDNA contained in Clone ID NO:Z). In particular, C-terminal deletions may be described by the general formula 1-n, where n is any whole integer ranging from 6 to q-1, and where n corresponds to the position of amino acid residue in a polypeptide of the invention. Polynucleotides encoding these polypeptides are also encompassed by the invention.

[0146] In addition, any of the above described N- or C-terminal deletions can be combined to produce a N- and C-terminal deleted polypeptide. The invention also provides polypeptides having one or more amino acids deleted from both the amino and the carboxyl termini, which may be described generally as having residues m-n of a polypeptide encoded by SEQ ID NO:X (e.g., including, but not limited to, the preferred polypeptide disclosed as SEQ ID NO:Y and the polypeptide encoded by the portion of SEQ ID NO:X as defined in columns 8 and 9 of Table 2), the cDNA contained in Clone ID NO:Z, and/or the complement thereof, where n and m are integers as described above. Polynucleotides encoding these polypeptides are also encompassed by the invention.

[0147] Also as mentioned above, even if deletion of one or more amino acids from the C-terminus of a protein results in modification of loss of one or more biological functions of the protein, other functional activities (e.g., biological activities, ability to multimerize, ability to bind a ligand) may still be retained. For example the ability of the shortened mutein to induce and/or bind to antibodies which recognize the complete or mature forms of the polypeptide generally will be retained when less than-the majority of the residues of the complete or mature polypeptide are removed from the C-terminus. Whether a particular polypeptide lacking C-terminal residues of a complete polypeptide retains such immunologic activities can readily be determined by routine methods described herein and otherwise known in the art. It is not unlikely that a mutein with a large number of deleted C-terminal amino acid residues may retain some biological or immunogenic activities. In fact, peptides composed of as few as six amino acid residues may often evoke an immune response.

[0148] The present application is also directed to proteins containing polypeptides at least 80%, 85%, 90%, 95%, 96%, 97%, 98% or 99% identical to a.polypeptide sequence set forth herein. In preferred embodiments, the application is directed to proteins containing polypeptides at least 80%, 85%, 90%, 95%, 96%, 97%, 98% or 99% identical to polypeptides having the amino acid sequence of the specific N- and C-terminal deletions. Polynucleotides encoding these polypeptides are also encompassed by the invention.

[0149] Any polypeptide sequence encoded by, for example, the polynucleotide sequences set forth as SEQ ID NO:X or the complement thereof, (presented, for example, in Tables 1A and 2), the cDNA contained in Clone ID NO:Z, or the polynucleotide sequence as defined in column 6 of Table 1B, may be analyzed to determine certain preferred regions of the polypeptide. For example, the amino acid sequence of a polypeptide encoded by a polynucleotide sequence of SEQ ID NO:X (e.g., the polypeptide of SEQ ID NO:Y and the polypeptide encoded by the portion of SEQ ID NO:X as defined in columnns 8 and 9 of Table 2) or the cDNA contained in Clone ID NO:Z may be analyzed using the default parameters of the DNASTAR computer algorithm (DNASTAR, Inc., 1228 S. Park St., Madison, Wis. 53715 USA; http://www.dnastar.com/).

[0150] Polypeptide regions that may be routinely obtained using the DNASTAR computer algorithm include, but are not limited to, Garnier-Robson alpha-regions, beta-regions, turn-regions, and coil-regions; Chou-Fasman alpha-regions, beta-regions, and turn-regions; Kyte-Doolittle hydrophilic regions and hydrophobic regions; Eisenberg alpha- and beta-amphipathic regions; Karplus-Schulz flexible regions; Emini surface-forming regions; and Jameson-Wolf regions of high antigenic index. Among highly preferred polynucleotides of the invention in this regard are those that encode polypeptides comprising regions that combine several structural features, such as several (e.g., 1, 2, 3 or 4) of the features set out above.

[0151] Additionally, Kyte-Doolittle hydrophilic regions and hydrophobic regions, Emini surface-forming regions, and Jameson-Wolf regions of high antigenic index (i.e., containing four or more contiguous amino acids having an antigenic index of greater than or equal to 1.5, as identified using the default parameters of the Jameson-Wolf program) can routinely be used to determine polypeptide regions that exhibit a high degree of potential for antigenicity. Regions of high antigenicity are determined from data by DNASTAR analysis by choosing values which represent regions of the polypeptide which are likely to be exposed on the surface of the polypeptide in an environment in which antigen recognition may occur in the process of initiation of an immune response.

[0152] Preferred polypeptide fragments of the invention are fragments comprising, or alternatively, consisting of, an amino acid sequence that displays a functional activity (e.g. biological activity) of the polypeptide sequence of which the amino acid sequence is a fragment. By a polypeptide displaying a “functional activity” is meant a polypeptide capable of one or more known functional activities associated with a full-length protein, such as, for example, biological activity, antigenicity, immunogenicity, and/or multimerization, as described herein.

[0153] Other preferred polypeptide fragments are biologically active fragments. Biologically active fragments are those exhibiting activity similar, but not necessarily identical, to an activity of the polypeptide of the present invention. The biological activity of the fragments may include an improved desired activity, or a decreased undesirable activity.

[0154] In preferred embodiments, polypeptides of the invention comprise, or alternatively consist of, one, two, three, four, five or more of the antigenic fragments of the polypeptide of SEQ ID NO:Y, or portions thereof. Polynucleotides encoding these polypeptides are also encompassed by the invention.

[0155] The present invention encompasses polypeptides comprising, or alternatively consisting of, an epitope of: the polypeptide sequence shown in SEQ ID NO:Y; a polypeptide sequence encoded by SEQ ID NO:X or the complementary strand thereto; the polypeptide sequence encoded by the portion of SEQ ID NO:X as defined in columns 8 and 9 of Table 2; the polypeptide sequence encoded by the portion of SEQ ID NO:B as defined in column 6 of Table 1B or the complement thereto; the polypeptide sequence encoded by the cDNA contained in Clone ID NO:Z; or the polypeptide sequence encoded by a polynucleotide that hybridizes to the sequence of SEQ ID NO:X, the complement of the sequence of SEQ ID NO:X, the complement of a portion of SEQ ID NO:X as defined in columns 8 and 9 of Table 2, or the cDNA sequence contained in Clone ID NO:Z under stringent hybridization conditions or alternatively, under lower stringency hybridization as defined supra. The present invention further encompasses polynucleotide sequences encoding an epitope of a polypeptide sequence of the invention (such as, for example, the sequence disclosed in SEQ ID NO:X, or a fragment thereof), polynucleotide sequences of the complementary strand of a polynucleotide sequence encoding an epitope of the invention, and polynucleotide sequences which hybridize to the complementary strand under stringent hybridization conditions or alternatively, under lower stringency hybridization conditions defined supra.

[0156] The term “epitopes,” as used herein, refers to portions of a polypeptide having antigenic or immunogenic activity in an animal, preferably a mammal, and most preferably in a human. In a preferred embodiment, the present invention encompasses a polypeptide comprising an epitope, as well as the polynucleotide encoding this polypeptide. An “immunogenic epitope,” as used herein, is defined as a portion of a protein that elicits an antibody response in an animal, as determined by any method known in the art, for example, by the methods for generating antibodies described infra. (See, for example, Geysen et al., Proc. Natl. Acad. Sci. USA 81:3998-4002 (1983)). The term “antigenic epitope,” as used herein, is defined as a portion of a protein to which an antibody can immunospecifically bind its antigen as determined by any method well known in the art, for example, by the immunoassays described herein. Immunospecific binding excludes non-specific binding but does not necessarily exclude cross-reactivity with other antigens. Antigenic epitopes need not necessarily be immunogenic.

[0157] Fragments which function as epitopes may be produced by any conventional means. (See, e.g., Houghten, R. A., Proc. Natl. Acad. Sci. USA 82:5131-5135 (1985) further described in U.S. Pat. No. 4,631,211.)

[0158] In the present invention, antigenic epitopes preferably contain a sequence of at least 4, at least 5, at least 6, at least 7, more preferably at least 8, at least 9, at least 10, at least 11, at least 12, at least 13, at least 14, at least 15, at least 20, at least 25, at least 30, at least 40, at least 50, and, most preferably, between about 15 to about 30 amino acids. Preferred polypeptides comprising immunogenic or antigenic epitopes are at least 10, 15, 20, 25, 30, 35, 40, 45, 50, 55, 60, 65, 70, 75, 80, 85, 90, 95, or 100 amino acid residues in length. Additional non-exclusive preferred antigenic epitopes include the antigenic epitopes disclosed herein, as well as portions thereof. Antigenic epitopes are useful, for example, to raise antibodies, including monoclonal antibodies, that specifically bind the epitope. Preferred antigenic epitopes include the antigenic epitopes disclosed herein, as well as any combination of two, three, four, five or more of these antigenic epitopes. Antigenic epitopes can be used as the target molecules in immunoassays. (See, for instance, Wilson et al., Cell 37:767-778 (1984); Sutcliffe et al., Science 219:660-666 (1983)).

[0159] Non-limiting examples of epitopes of polypeptides that can be used to generate antibodies of the invention include a polypeptide comprising, or alternatively consisting of, at least one, two, three, four, five, six or more of the portion(s) of SEQ ID NO:Y specified in column 7 of Table 1A. These polypeptide fragments have been determined to bear antigenic epitopes of the proteins of the invention by the analysis of the Jameson-Wolf antigenic index which is included in the DNAStar suite of computer programs. By “comprise” it is intended that a polypeptide contains at least one, two, three, four, five, six or more of the portion(s) of SEQ ID NO:Y shown in column 7 of Table 1A, but it may contain additional flanking residues on either the amino or carboxyl termini of the recited portion. Such additional flanking sequences are preferably sequences naturally found adjacent to the portion; i.e., contiguous sequence shown in SEQ ID NO:Y. The flanking sequence may, however, be sequences from a heterolgous polypeptide, such as from another protein described herein or from a heterologous polypeptide not described herein. In particular embodiments, epitope portions of a polypeptide of the invention comprise one, two, three, or more of the portions of SEQ ID NO:Y shown in column 7 of Table 1A.

[0160] Similarly, immunogenic epitopes can be used, for example, to induce antibodies according to methods well known in the art. See, for instance, Sutcliffe et al., supra; Wilson et al., supra; Chow et al., Proc. Natl. Acad. Sci. USA 82:910-914; and Bittle et al., J. Gen. Virol. 66:2347-2354 (1985). Preferred immunogenic epitopes include the immunogenic epitopes disclosed herein, as well as any combination of two, three, four, five or more of these immunogenic epitopes. The polypeptides comprising one or more immunogenic epitopes may be presented for eliciting an antibody response together with a camer protein, such as an albumin, to an animal system (such as rabbit or mouse), or, if the polypeptide is of sufficient length (at least about 25 amino acids), the polypeptide may be presented without a carrier. However, immunogenic epitopes comprising as few as 8 to 10 amino acids have been shown to be sufficient to raise antibodies capable of binding to, at the very least, linear epitopes in a denatured polypeptide (e.g., in Western blotting).

[0161] Epitope-bearing polypeptides of the present invention may be used to induce antibodies according to methods well known in the art including, but not limited to, in vivo immunization, in vitro immunization, and phage display methods. See, e.g., Sutcliffe et al., supra; Wilson et al., supra, and Bittle et al., J. Gen. Virol., 66:2347-2354 (1985). If in vivo immunization is used, animals may be immunized with free peptide; however, anti-peptide antibody titer may be boosted by coupling the peptide to a macromolecular carrier, such as keyhole limpet hemacyanin (KLH) or tetanus toxoid. For instance, peptides containing cysteine residues may be coupled to a carrier using a linker such as maleimidobenzoyl-N-hydroxysuccinimide ester (MBS), while other peptides may be coupled to carriers using a more general linking agent such as glutaraldehyde. Animals such as rabbits, rats and mice are immunized with either free or carrier- coupled peptides, for instance, by intraperitoneal and/or intradermal injection of emulsions containing about 100 μg of peptide or carrier protein and Freund's adjuvant or any other adjuvant known for stimulating an immune response. Several booster injections may be needed, for instance, at intervals of about two weeks, to provide a useful titer of anti-peptide antibody which can be detected, for example, by ELISA assay using free peptide adsorbed to a solid surface. The titer of anti-peptide antibodies in serum from an immunized animal may be increased by selection of anti-peptide antibodies, for instance, by adsorption to the peptide on a solid support and elution of the selected antibodies according to methods well known in the art.

[0162] As one of skill in the art will appreciate, and as discussed above, the polypeptides of the present invention (e.g., those comprising an immunogenic or antigenic epitope) can be fused to heterologous polypeptide sequences. For example, polypeptides of the present invention (including fragments or variants thereof), may be fused with the constant domain of immunoglobulins (IgA, IgE, IgG, IgM), or portions thereof (CH1, CH2, CH3, or any combination thereof and portions thereof, resulting in chimeric polypeptides. By way of another non-limiting example, polypeptides and/or antibodies of the present invention (including fragments or variants thereof) may be fused with albumin (including but not limited to recombinant human serum albumin or fragments or variants thereof (see, e.g., U.S. Pat. No. 5,876,969, issued Mar. 2, 1999, EP Patent 0 413 622, and U.S. Pat. No. 5,766,883, issued Jun. 16, 1998, herein incorporated by reference in their entirety)). In a preferred embodiment, polypeptides and/or antibodies of the present invention (including fragments or variants thereof) are fused with the mature form of human serum albumin (i.e., amino acids 1-585 of human serum albumin as shown in FIGS. 1 and 2 of EP Patent 0 322 094) which is herein incorporated by reference in its entirety. In another preferred embodiment, polypeptides and/or antibodies of the present invention (including fragments or variants thereof) are fused with polypeptide fragments comprising, or alternatively consisting of, amino acid residues 1-z of human serum albumin, where z is an integer from 369 to 419, as described in U.S. Pat. No. 5,766,883 herein incorporated by reference in its entirety. Polypeptides and/or antibodies of the present invention (including fragments or variants thereof) may be fused to either the N- or C-terminal end of the heterologous protein (e.g., immunoglobulin Fc polypeptide or human serum albumin polypeptide). Polynucleotides encoding fusion proteins of the invention are also encompassed by the invention.

[0163] Such fusion proteins as those described above may facilitate purification and may increase half-life in vivo. This has been shown for chimeric proteins consisting of the first two domains of the human CD4-polypeptide and various domains of the constant regions of the heavy or light chains of mammalian immunoglobulins. See, e.g., EP 394,827; Traunecker et al., Nature, 331:84-86 (1988). Enhanced delivery of an antigen across the epithelial barrier to the immune system has been demonstrated for antigens (e.g., insulin) conjugated to an FcRn binding partner such as IgG or Fc fragments (see, e.g., PCT Publications WO 96/22024 and WO 99/04813). IgG fusion proteins that have a disulfide-linked dimeric structure due to the IgG portion desulfide bonds have also been found to be more efficient in binding and neutralizing other molecules than monomeric polypeptides or fragments thereof alone. See, e.g., Fountoulakis et al., J. Biochem., 270:3958-3964 (1995). Nucleic acids encoding the above epitopes can also be recombined with a gene of interest as an epitope tag (e.g., the hemagglutinin (HA) tag or flag tag) to aid in detection and purification of the expressed polypeptide. For example, a system described by Janknecht et al. allows for the ready purification of non-denatured fusion proteins expressed in human cell lines (Janknecht et al., 1991, Proc. Natl. Acad. Sci. USA 88:8972-897). In this system, the gene of interest is subcloned into a vaccinia recombination plasmid such that the open reading frame of the gene is translationally fused to an amino-terminal tag consisting of six histidine residues. The tag serves as a matrix binding domain for the fusion protein. Extracts from cells infected with the recombinant vaccinia virus are loaded onto Ni2+ nitriloacetic acid-agarose column and histidine-tagged proteins can be selectively eluted with imidazole-containing buffers.

[0164] Fusion Proteins

[0165] Any polypeptide of the present invention can be used to generate fusion proteins. For example, the polypeptide of the present invention, when fused to a second protein, can be used as an antigenic tag. Antibodies raised against the polypeptide of the present invention can be used to indirectly detect the second protein by binding to the polypeptide. Moreover, because secreted proteins target cellular locations based on trafficking signals, polypeptides of the present invention which are shown to be secreted can be used as targeting molecules once fused to other proteins.

[0166] Examples of domains that can be fused to polypeptides of the present invention include not only heterologous signal sequences, but also other heterologous functional regions. The fusion does not necessarily need to be direct, but may occur through linker sequences.

[0167] In certain preferred embodiments, proteins of the invention are fusion proteins comprising an amino acid sequence that is an N and/or C-terminal deletion of a polypeptide of the invention. In preferred embodiments, the invention is directed to a fusion protein comprising an amino acid sequence that is at least 90%, 95%, 96%, 97%, 98% or 99% identical to a polypeptide sequence of the invention. Polynucleotides encoding these proteins are also encompassed by the invention.

[0168] Moreover, fusion proteins may also be engineered to improve characteristics of the polypeptide of the present invention. For instance, a region of additional amino acids, particularly charged amino acids, may be added to the N-terminus of the polypeptide to improve stability and persistence during purification from the host cell or subsequent handling and storage. Also, peptide moieties may be added to the polypeptide to facilitate purification. Such regions may be removed prior to final preparation of the polypeptide. The addition of peptide moieties to facilitate handling of polypeptides are familiar and routine techniques in the art.

[0169] As one of skill in the art will appreciate that, as discussed above, polypeptides of the present invention, and epitope-bearing fragments thereof, can be combined with heterologous polypeptide sequences. For example, the polypeptides of the present invention may be fused with heterologous polypeptide sequences, for example, the polypeptides of the present invention may be fused with the constant domain of immunoglobulins (IgA, IgE, IgG, IgM) or portions thereof (CH1, CH2, CH3, and any combination thereof, including both entire domains and portions thereof), or albumin (including, but not limited to, native or recombinant human albumin or fragments or variants thereof (see, e.g., U.S. Pat. No. 5,876,969, issued Mar. 2, 1999, EP Patent 0 413 622, and U.S. Pat. No. 5,766,883, issued Jun. 16, 1998, herein incorporated by reference in their entirety)), resulting in chimeric polypeptides. For example, EP-A-O 464 533 (Canadian counterpart 2045869) discloses fusion proteins comprising various portions of constant region of immunoglobulin molecules together with another human protein or part thereof. In many cases, the Fc part in a fusion protein is beneficial in therapy and diagnosis, and thus can result in, for example, improved pharmacokinetic properties (EP-A 0232 262). Alternatively, deleting the Fc part after the fusion protein has been expressed, detected, and purified, would be desired. For example, the Fc portion may hinder therapy and diagnosis if the fusion protein is used as an antigen for immunizations. In drug discovery, for example, human proteins, such as hIL-5, have been fused with Fc portions for the purpose of high-throughput screening assays to identify antagonists of hIL-5. See, D. Bennett et al., J. Molecular Recognition 8:52-58 (1995); K. Johanson et al., J. Biol. Chem. 270:9459-9471 (1995).

[0170] Moreover, the polypeptides of the present invention can be fused to marker sequences, such as a polypeptide which facilitates purification of the fused polypeptide. In preferred embodiments, the marker amino acid sequence is a hexa-histidine peptide, such as the tag provided in a pQE vector (QIAGEN, Inc., 9259 Eton Avenue, Chatsworth, Calif., 91311), among others, many of which are commercially available. As described in Gentz et al., Proc. Natl. Acad. Sci. USA 86:821-824 (1989), for instance, hexa-histidine provides for convenient purification of the fusion protein. Another peptide tag useful for purification, the “HA” tag, corresponds to an epitope derived from the influenza hemagglutinin protein (Wilson et al., Cell 37:767 (1984)).

[0171] Additional fusion proteins of the invention may be generated through the techniques of gene-shuffling, motif-shuffling, exon-shuffling, and/or codon-shuffling (collectively referred to as “DNA shuffling”). DNA shuffling may be employed to modulate the activities of polypeptides of the invention, such methods can be used to generate polypeptides with altered activity, as well as agonists and antagonists of the polypeptides. See, generally, U.S. Pat. Nos. 5,605,793; 5,811,238; 5,830,721; 5,834,252; and 5,837,458, and Patten et al., Curr. Opinion Biotechnol. 8:724-33 (1997); Harayama, Trends Biotechnol. 16(2):76-82 (1998); Hansson, et al., J. Mol. Biol. 287:265-76 (1999); and Lorenzo and Blasco, Biotechniques 24(2):308-13 (1998) (each of these patents and publications are hereby incorporated by reference in its entirety). In one embodiment, alteration of polynucleotides corresponding to SEQ ID NO:X and the polypeptides encoded by these polynucleotides may be achieved by DNA shuffling. DNA shuffling involves the assembly of two or more DNA segments by homologous or site-specific recombination to generate variation in the polynucleotide sequence. In another embodiment, polynucleotides of the invention, or the encoded polypeptides, may be altered by being subjected to random mutagenesis by error-prone PCR, random nucleotide insertion or other methods prior to recombination. In another embodiment, one or more components, motifs, sections, parts, domains, fragments, etc., of a polynucleotide encoding a polypeptide of the invention may be recombined with one or more components, motifs, sections, parts, domains, fragments, etc. of one or more heterologous molecules.

[0172] Thus, any of these above fusions can be engineered using the polynucleotides or the polypeptides of the present invention.

[0173] Recombinant and Synthetic Production of Polypeptides of the Invention

[0174] The present invention also relates to vectors containing the polynucleotide of the present invention, host cells, and the production of polypeptides by synthetic and recombinant techniques. The vector may be, for example, a phage, plasmid, viral, or retroviral vector. Retroviral vectors may be replication competent or replication defective. In the latter case, viral propagation generally will occur only in complementing host cells.

[0175] The polynucleotides of the invention may be joined to a vector containing a selectable marker for propagation in a host. Generally, a plasmid vector is introduced in a precipitate, such as a calcium phosphate precipitate, or in a complex with a charged lipid. If the vector is a virus, it may be packaged in vitro using an appropriate packaging cell line and then transduced into host cells.

[0176] The polynucleotide insert should be operatively linked to an appropriate promoter, such as the phage lambda PL promoter, the E. coli lac, trp, phoA and tac promoters, the SV40 early and late promoters and promoters of retroviral LTRs, to name a few. Other suitable promoters will be known to the skilled artisan. The expression constructs will further contain sites for transcription initiation, termination, and, in the transcribed region, a ribosome binding site for translation. The coding portion of the transcripts expressed by the constructs will preferably include a translation initiating codon at the beginning and a termination codon (UAA, UGA or UAG) appropriately positioned at the end of the polypeptide to be translated.

[0177] As indicated, the expression vectors will preferably include at least one selectable marker. Such markers include dihydrofolate reductase, G418, glutamine synthase, or neomycin resistance for eukaryotic cell culture, and tetracycline, kanamycin or ampicillin resistance genes for culturing in E. coli and other bacteria. Representative examples of appropriate hosts include, but are not limited to, bacterial cells, such as E. coli, Streptomyces and Salmonella typhimurium cells; fungal cells, such as yeast cells (e.g., Saccharomyces cerevisiae or Pichia pastoris (ATCC Accession No. 201178)); insect cells such as Drosophila S2 and Spodoptera Sf9 cells; animal cells such as CHO, COS, 293, and Bowes melanoma cells; and plant cells. Appropriate culture mediums and conditions for the above-described host cells are known in the art.

[0178] Among vectors preferred for use in bacteria include pQE70, pQE60 and pQE-9, available from QIAGEN, Inc.; pBluescript vectors, Phagescript vectors, pNH8A, pNH16a, pNH18A, pNH46A, available from Stratagene Cloning Systems, Inc.; and ptrc99a, pKK223-3, pKK233-3, pDR540, pRIT5 available from Pharmacia Biotech, Inc. Among preferred eukaryotic vectors are pWLNEO, pSV2CAT, pOG44, pXT1 and pSG available from Stratagene; and pSVK3, pBPV, pMSG and pSVL available from Pharmacia. Preferred expression vectors for use in yeast systems include, but are not limited to pYES2, pYD1, pTEF1/Zeo, pYES2/GS, pPICZ, pGAPZ, pGAPZalph, pPIC9, pPIC3.5, pHIL-D2, pHIL-S1, pPIC3.5K, pPIC9K, and PAO815 (all available from Invitrogen, Carlbad, Calif.). Other suitable vectors will be readily apparent to the skilled artisan.

[0179] Vectors which use glutamine synthase (GS) or DHFR as the selectable markers can be amplified in the presence of the drugs methionine sulphoximine or methotrexate, respectively. An advantage of glutamine synthase based vectors are the availabilty of cell lines (e.g., the murine myeloma cell line, NSO) which are glutamine synthase negative. Glutamine synthase expression systems can also function in glutamine synthase expressing cells (e.g., Chinese Hamster Ovary (CHO) cells) by providing additional inhibitor to prevent the functioning of the endogenous gene. A glutamine synthase expression system and components thereof are detailed in PCT publications: WO87/04462; WO86/05807; WO89/01036; WO89/10404; and WO91/06657, which are hereby incorporated in their entireties by reference herein. Additionally, glutamine synthase expression vectors can be obtained from Lonza Biologics, Inc. (Portsmouth, N.H.). Expression and production of monoclonal antibodies using a GS expression system in murine myeloma cells is described in Bebbington et al., Bio/technology 10:169(1992) and in Biblia and Robinson Biotechnol. Prog. 11:1 (1995) which are herein incorporated by reference.

[0180] The present invention also relates to host cells containing the above-described vector constructs described herein, and additionally encompasses host cells containing nucleotide sequences of the invention that are operably associated with one or more heterologous control regions (e.g., promoter and/or enhancer) using techniques known of in the art. The host cell can be a higher eukaryotic cell, such as a mammalian cell (e.g., a human derived cell), or a lower eukaryotic cell, such as a yeast cell, or the host cell can be a prokaryotic cell, such as a bacterial cell. A host strain may be chosen which modulates the expression of the inserted gene sequences, or modifies and processes the gene product in the specific fashion desired. Expression from certain promoters can be elevated in the presence of certain inducers; thus expression of the genetically engineered polypeptide may be controlled. Furthermore, different host cells have characteristics and specific mechanisms for the translational and post-translational processing and modification (e.g., phosphorylation, cleavage) of proteins. Appropriate cell lines can be chosen to ensure the desired modifications and processing of the foreign protein expressed.

[0181] Introduction of the nucleic acids and nucleic acid constructs of the invention into the host cell can be effected by calcium phosphate transfection, DEAE-dextran mediated transfection, cationic lipid-mediated transfection, electroporation, transduction, infection, or other methods. Such methods are described in many standard laboratory manuals, such as Davis et al., Basic Methods In Molecular Biology (1986). It is specifically contemplated that the polypeptides of the present invention may in fact be expressed by a host cell lacking a recombinant vector.

[0182] In addition to encompassing host cells containing the vector constructs discussed herein, the invention also encompasses primary, secondary, and immortalized host cells of vertebrate origin, particularly mammalian origin, that have been engineered to delete or replace endogenous genetic material (e.g., the coding sequence), and/or to include genetic material (e.g., heterologous polynucleotide sequences) that is operably associated with polynucleotides of the invention, and which activates, alters, and/or amplifies endogenous polynucleotides. For example, techniques known in the art may be used to operably associate heterologous control regions (e.g., promoter and/or enhancer) and endogenous polynucleotide sequences via homologous recombination (see, e.g., U.S. Pat. No. 5,641,670, issued Jun. 24, 1997; International Publication Number WO 96/29411; International Publication Number WO 94/12650; Koller et al., Proc. Natl. Acad. Sci. USA 86:8932-8935 (.1989); and Zijlstra et al., Nature 342:435-438 (1989), the disclosures of each of which are incorporated by reference in their entireties).

[0183] Polypeptides of the invention can be recovered and purified from recombinant cell cultures by well-known methods including ammonium sulfate or ethanol precipitation, acid extraction, anion or cation exchange chromatography, phosphocellulose chromatography, hydrophobic interaction chromatography, affinity chromatography, hydroxylapatite chromatography and lectin chromatography. Most preferably, high performance liquid chromatography (“HPLC”) is employed for purification.

[0184] Polypeptides of the present invention can also be recovered from: products purified from natural sources, including bodily fluids, tissues and cells, whether directly isolated or cultured; products of chemical synthetic procedures; and products produced by recombinant techniques from a prokaryotic or eukaryotic host, including, for example, bacterial, yeast, higher plant, insect, and mammalian cells. Depending upon the host employed in a recombinant production procedure, the polypeptides of the present invention may be glycosylated or may be non-glycosylated. In addition, polypeptides of the invention may also include an initial modified methionine residue, in some cases as a result of host-mediated processes. Thus, it is well known in the art that the N-terminal methionine encoded by the translation initiation codon generally is removed with high efficiency from any protein after translation in all eukaryotic cells. While the N-terminal methionine on most proteins also is efficiently removed in most prokaryotes, for some proteins, this prokaryotic removal process is inefficient, depending on the nature of the amino acid to which the N-terminal methionine is covalently linked.

[0185] In one embodiment, the yeast Pichia pastoris is used to express polypeptides of the invention in a eukaryotic system. Pichia pastoris is a methylotrophic yeast which can metabolize methanol as its sole carbon source. A main step in the methanol metabolization pathway is the oxidation of methanol to formaldehyde using O₂. This reaction is catalyzed by the enzyme alcohol oxidase. In order to metabolize methanol as its sole carbon source, Pichia pastoris must generate high levels of alcohol oxidase due, in part, to the relatively low affinity of alcohol oxidase for O₂. Consequently, in a growth medium depending on methanol as a main carbon source, the promoter region of one of the two alcohol oxidase genes (AOX1) is highly active. In the presence of methanol, alcohol oxidase produced from the AOX1 gene comprises up to approximately 30% of the total soluble protein in Pichia pastoris. See Ellis, S. B., et al., Mol. Cell. Biol. 5:1111-21 (1985); Koutz, P. J, et al., Yeast 5:167-77 (1989); Tschopp, J. F., et al., Nucl. Acids Res. 15:3859-76 (1987). Thus, a heterologous coding sequence, such as, for example, a polynucleotide of the present invention, under the transcriptional regulation of all or part of the AOX1 regulatory sequence is expressed at exceptionally high levels in Pichia yeast grown in the presence of methanol.

[0186] In one example, the plasmid vector pPIC9K is used to express DNA encoding a polypeptide of the invention, as set forth herein, in a Pichea yeast system essentially as described in “Pichia Protocols: Methods in Molecular Biology,” D. R. Higgins and J. Cregg, eds. The Humana Press, Totowa, N.J., 1998. This expression vector allows expression and secretion of a polypeptide of the invention by virtue of the strong AOX1 promoter linked to the Pichia pastoris alkaline phosphatase (PHO) secretory signal peptide (i.e., leader) located upstream of a multiple cloning site.

[0187] Many other yeast vectors could be used in place of pPIC9K, such as, pYES2, pYDI, pTEF1/Zeo, pYES2/GS, pPICZ, pGAPZ, pGAPZalpha, pPIC9, pPIC3.5, pHIL-D2, pHIL-S1, pPIC3.5K, and PAO815, as one skilled in the art would readily appreciate, as long as the proposed expression construct provides appropriately located signals for transcription, translation, secretion (if desired), and the like, including an in-frame AUG as required.

[0188] In another embodiment, high-level expression of a heterologous coding sequence, such as, for example, a polynucleotide of the present invention, may be achieved by cloning the heterologous polynucleotide of the invention into an expression vector such as, for example, pGAPZ or pGAPZalpha, and growing the yeast culture in the absence of methanol.

[0189] In addition to encompassing, host cells containing the vector constructs discussed herein, the invention also encompasses primary, secondary, and immortalized host cells of vertebrate origin, particularly mammalian origin, that have been engineered to delete or replace endogenous genetic material (e.g., coding sequence), and/or to include genetic material (e.g., heterologous polynucleotide sequences) that is operably associated with polynucleotides of the invention, and which activates, alters, and/or amplifies endogenous polynucleotides. For example, techniques known in the art may be used to operably associate heterologous control regions (e.g., promoter and/or enhancer) and endogenous polynucleotide sequences via homologous recombination (see, e.g., U.S. Pat. No. 5,641,670, issued Jun. 24, 1997; International Publication No. WO 96/29411, published Sep. 26, 1996; International Publication No. WO 94/12650, published Aug. 4, 1994; Koller et al., Proc. Natl. Acad. Sci. USA 86:8932-8935 (1989); and Zijlstra et al., Nature 342:435-438 (1989), the disclosures of each of which are incorporated by reference in their entireties).

[0190] In addition, polypeptides of the invention can be chemically synthesized using techniques known in the art (e.g., see Creighton, 1983, Proteins: Structures and Molecular Principles, W.H. Freeman & Co., N.Y., and Hunkapiller et al., Nature, 310:105-111 (1984)). For example, a polypeptide corresponding to a fragment of a polypeptide can be synthesized by use of a peptide synthesizer. Furthermore, if desired, nonclassical amino acids or chemical amino acid analogs can be introduced as a substitution or addition into the polypeptide sequence. Non-classical amino acids include, but are not limited to, to the D-isomers of the common amino acids, 2,4-diaminobutyric acid, a-amino isobutyric acid, 4-aminobutyric acid, Abu, 2-amino butyric acid, g-Abu, e-Ahx, 6-amino hexanoic acid, Aib, 2-amino isobutyric acid, 3-amino propionic acid, ornithine, norleucine, norvaline, hydroxyproline, sarcosine, citrulline, homocitrulline, cysteic acid, t-butylglycine, t-butylalanine, phenylglycine, cyclohexylalanine, b-alanine, fluoro-amino acids, designer amino acids such as b-methyl amino acids, Ca-methyl amino acids, Na-methyl amino acids, and amino acid analogs in general. Furthermore, the amino acid can be D (dextrorotary) or L (levorotary):

[0191] The invention encompasses polypeptides of the present invention which are differentially modified during or after translation, e.g., by glycosylation, acetylation, phosphorylation, amidation, derivatization by known protecting/blocking groups, proteolytic cleavage, linkage to an antibody molecule or other cellular ligand, etc. Any of numerous chemical modifications may be carried out by known techniques, including but not limited, to specific chemical cleavage by cyanogen bromide, trypsin, chymotrypsin, papain, V8 protease, NaBH₄; acetylation, formylation, oxidation, reduction; metabolic synthesis in the presence of tunicamycin; etc.

[0192] Additional post-translational modifications encompassed by the invention include, for example, e.g., N-linked or O-linked carbohydrate chains, processing of N-terminal or C-terminal ends), attachment of chemical moieties to the amino acid backbone, chemical modifications of N-linked or O-linked carbohydrate chains, and addition or deletion of an N-terminal methionine residue as a result of procaryotic host cell expression. The polypeptides may also be modified with a detectable label, such as an enzymatic, fluorescent, isotopic or affinity label to allow for detection and isolation of the protein.

[0193] Examples of suitable enzymes include horseradish peroxidase, alkaline phosphatase, beta-galactosidase, or acetylcholinesterase; examples of suitable prosthetic group complexes include streptavidin/biotin and avidin/biotin; examples of suitable fluorescent materials include umbelliferone, fluorescein, fluorescein isothiocyanate, rhodamine, dichlorotriazinylamine fluorescein, dansyl chloride or phycoerythrin; an example of a luminescent material includes luminol; examples of bioluminescent materials include luciferase, luciferin, and aequorin; and examples of suitable radioactive material include iodine (¹²¹I, ¹²³I, ¹²⁵I, ¹³¹I), carbon (¹⁴C) sulfur (³⁵S), tritium (³H), indium (¹¹¹In, ¹¹²In, ^{113m}In, ^{115m}In), technetium (⁹⁹Tc,^{99m}Tc), thallium (²⁰¹Ti), gallium (⁶⁸Ga, ⁶⁷Ga), palladium (¹⁰³Pd), molybdenum (⁹⁹Mo), xenon (¹³³Xe), fluorine (¹⁸F), ¹⁵³Sm, ¹⁷⁷Lu, ¹⁵⁹Gd, ¹⁴⁹Pm, ¹⁴⁰La, ¹⁷⁵Yb, ¹⁶⁶Ho, ⁹⁰Y, ⁴⁷Sc, ¹⁸⁶Re, ¹⁸⁸Re, ¹⁴²Pr, ¹⁰⁵Rh, and ⁹⁷Ru.

[0194] In specific embodiments, a polypeptide of the present invention or fragment or variant thereof is attached to macrocyclic chelators that associate with radiometal ions, including but not limited to, ¹⁷⁷Lu, ⁹⁰Y, ¹⁶⁶Ho, and ¹⁵³Sm, to polypeptides. In a preferred embodiment, the radiometal ion associated with the macrocyclic chelators is ¹¹¹In. In another preferred embodiment, the radiometal ion associated with the macrocyclic chelator is ⁹⁰Y. In specific embodiments, the macrocyclic chelator is 1,4,7,10-tetraazacyclododecane-N,N′,N″,N′″-tetraacetic acid (DOTA). In other specific embodiments, DOTA is attached to an antibody of the invention or fragment thereof via a linker molecule. Examples of linker molecules useful for conjugating DOTA to a polypeptide are commonly known in the art—see, for example, DeNardo et al., Clin Cancer Res. 4(10):2483-90 (1998); Peterson et al., Bioconjug. Chem. 10(4):553-7 (1999); and Zimmerman et al, Nucl. Med. Biol. 26(8):943-50 (1999); which are hereby incorporated by reference in their entirety.

[0195] As mentioned, the proteins of the invention may be modified by either natural processes, such as posttranslational processing, or by chemical modification techniques which are well known in the art. It will be appreciated that the same type of modification may be present in the same or varying degrees at several sites in a given polypeptide. Polypeptides of the invention may be branched, for example, as a result of ubiquitination, and they may be cyclic, with or without branching. Cyclic, branched, and branched cyclic polypeptides may result from posttranslation natural processes or may be made by synthetic methods. Modifications include acetylation, acylation, ADP-ribosylation, amidation, covalent attachment of flavin, covalent attachment of a heme moiety, covalent attachment of a nucleotide or nucleotide derivative, covalent attachment of a lipid or lipid derivative, covalent attachment of phosphotidylinositol, cross-linking, cyclization, disulfide bond formation, demethylation, formation of covalent cross-links, formation of cysteine, formation of pyroglutamate, formylation, gamma-carboxylation, glycosylation, GPI anchor formation, hydroxylation, iodination, methylation, myristoylation, oxidation, pegylation, proteolytic processing, phosphorylation, prenylation, racemization, selenoylation, sulfation, transfer-RNA mediated addition of amino acids to proteins such as arginylation, and ubiquitination. (See, for instance, PROTEINS—STRUCTURE AND MOLECULAR PROPERTIES, 2nd Ed., T. E. Creighton, W. H. Freeman and Company, New York (1993); POSTTRANSLATIONAL COVALENT MODIFICATION OF PROTEINS, B. C. Johnson, Ed., Academic Press, New York, pgs. 1-12 (1983); Seifter et al., Meth. Enzymol. 182:626-646 (1990); Rattan et al., Ann. N.Y. Acad. Sci. 663:48-62 (1992)).

[0196] Also provided by the invention are chemically modified derivatives of the polypeptides of the invention which may provide additional advantages such as increased solubility, stability and circulating time of the polypeptide, or decreased immunogenicity (see U.S. Pat. No. 4,179,337). The chemical moieties for derivitization may be selected from water soluble polymers such as polyethylene glycol, ethylene glycol/propylene glycol copolymers, carboxymethylcellulose, dextran, polyvinyl alcohol and the like. The polypeptides may be modified at random positions within the molecule, or at predetermined positions within the molecule and may include one, two, three or more attached chemical moieties.

[0197] The polymer may be of any molecular weight, and may be branched or unbranched. For polyethylene glycol, the preferred molecular weight is between about 1 kDa and about 100 kDa (the term “about” indicating that in preparations of polyethylene glycol, some molecules will weigh more, some less, than the stated molecular weight) for ease in handling and manufacturing. Other sizes may be used, depending on the desired therapeutic profile (e.g., the duration of sustained release desired, the effects, if any on biological activity, the ease in handling, the degree or lack of antigenicity and other known effects of the polyethylene glycol to a therapeutic protein or analog). For example, the polyethylene glycol may have an average molecular weight of about 200, 500, 1000, 1500, 2000, 2500, 3000, 3500, 4000, 4500, 5000, 5500, 6000, 6500, 7000, 7500, 8000, 8500, 9000, 9500, 10,000, 10,500, 11,000, 11,500, 12,000, 12,500, 13,000, 13,500, 14,000, 14,500, 15,000, 15,500, 16,000, 16,500, 17,000, 17,500, 18,000, 18,500, 19,000, 19,500, 20,000, 25,000, 30,000, 35,000, 40,000, 45,000, 50,000, 55,000, 60,000, 65,000, 70,000, 75,000, 80,000, 85,000, 90,000, 95,000, or 100,000 kDa.

[0198] As noted above, the polyethylene glycol may have a branched structure. Branched polyethylene glycols are described, for example, in U.S. Pat. No. 5,643,575; Morpurgo et al., Appl. Biochem. Biotechnol. 56:59-72 (1996); Vorobjev et al., Nucleosides Nucleotides 18:2745-2750 (1999); and Caliceti et al., Bioconjug. Chem. 10:638-646 (1999), the disclosures of each of which are incorporated herein by reference.

[0199] The polyethylene glycol molecules (or other chemical moieties) should be attached to the protein with consideration of effects on functional or antigenic domains of the protein. There are a number of attachment methods available to those skilled in the art, such as, for example, the method disclosed in EP 0 401 384 (coupling PEG to G-CSF), herein incorporated by reference; see also Malik et al., Exp. Hematol. 20:1028-1035 (1992), reporting pegylation of GM-CSF using tresyl chloride. For example, polyethylene glycol may be covalently bound through amino acid residues via a reactive group, such as a free amino or carboxyl group. Reactive groups are those to which an activated polyethylene glycol molecule may be bound. The amino acid residues having a free amino group may include lysine residues and the N-terminal amino acid residues; those having a free carboxyl group may include aspartic acid residues glutamic acid residues and the C-terminal amino acid residue. Sulfhydryl groups may also be used as a reactive group for attaching the polyethylene glycol molecules. Preferred for therapeutic purposes is attachment at an amino group, such as attachment at the N-terminus or lysine group.

[0200] As suggested above, polyethylene glycol may be attached to proteins via linkage to any of a number of amino acid residues. For example, polyethylene glycol can be linked to proteins via covalent bonds to lysine, histidine, aspartic acid, glutamic acid, or cysteine residues. One or more reaction chemistries may be employed to attach polyethylene glycol to specific amino acid residues (e.g., lysine, histidine, aspartic acid, glutamic acid, or cysteine) of the protein or to more than one type of amino acid residue (e.g., lysine, histidine, aspartic acid, glutamic acid, cysteine and combinations thereof) of the protein.

[0201] One may specifically desire proteins chemically modified at the N-terminus. Using polyethylene glycol as an illustration of the present composition, one may select from a variety of polyethylene glycol molecules (by molecular weight, branching, etc.), the proportion of polyethylene glycol molecules to protein (polypeptide) molecules in the reaction mix, the type of pegylation reaction to be performed, and the method of obtaining the selected N-terminally pegylated protein. The method of obtaining the N-terminally pegylated preparation (i.e., separating this moiety from other monopegylated moieties if necessary) may be by purification of the N-terminally pegylated material from a population of pegylated protein molecules. Selective proteins chemically modified at the N-terminus modification may be accomplished by reductive alkylation which exploits differential reactivity of different types of primary amino groups (lysine versus the N-terminal) available for derivatization in a particular protein. Under the appropriate reaction conditions, substantially selective derivatization of the protein at the N-terminus with a carbonyl group containing polymer is achieved.

[0202] As indicated above, pegylation of the proteins of the invention may be accomplished by any number of means. For example, polyethylene glycol may be attached to the protein either directly or by an intervening linker. Linkerless systems for attaching polyethylene glycol to proteins are described in Delgado et al., Crit. Rev. Thera. Drug Carrier Sys. 9:249-304 (1992); Francis et al., Intern. J. of Hematol. 68:1-18 (1998); U.S. Pat. No. 4,002,531; U.S. Pat. No. 5,349,052; WO 95/06058; and WO 98/32466, the disclosures of each of which are incorporated herein by reference.

[0203] One system for attaching polyethylene glycol directly to amino acid residues of proteins without an intervening linker employs tresylated MPEG, which is produced by the modification of monmethoxy polyethylene glycol (MPEG) using tresylchloride (ClSO₂CH₂CF₃). Upon reaction of protein with tresylated MPEG, polyethylene glycol is directly attached to amine groups of the protein. Thus, the invention includes protein-polyethylene glycol conjugates produced by reacting proteins of the invention with a polyethylene glycol molecule having a 2,2,2-trifluoreothane sulphonyl group.

[0204] Polyethylene glycol can also be attached to proteins using a number of different intervening linkers. For example, U.S. Pat. No. 5,612,460, the entire disclosure of which is incorporated herein by reference, discloses urethane linkers for connecting polyethylene glycol to proteins. Protein-polyethylene glycol conjugates wherein the polyethylene glycol is attached to the protein by a linker can also be produced by reaction of proteins with compounds such as MPEG-succinimidylsuccinate, MPEG activated with 1,1′-carbonyldiimidazole, MPEG-2,4,5-trichloropenylcarbonate, MPEG-p-nitrophenolcarbonate, and various MPEG-succinate derivatives. A number of additional polyethylene glycol derivatives and reaction chemistries for attaching polyethylene glycol to proteins are described in International Publication No. WO 98/32466, the entire disclosure of which is incorporated herein by reference. Pegylated protein products produced using the reaction chemistries set out herein are included within the scope of the invention.

[0205] The number of polyethylene glycol moieties attached to each protein of the invention (i.e., the degree of substitution) may also vary. For example, the pegylated proteins of the invention may be linked, on average, to 1, 2, 3, 4, 5, 6, 7, 8, 9, 10, 12, 15, 17, 20, or more polyethylene glycol molecules. Similarly, the average degree of substitution within ranges such as 1-3, 2-4, 3-5, 4-6, 5-7, 6-8, 7-9, 8-10, 9-11, 10-12, 11-13, 12-14, 13-15, 14-16, 15-17, 16-18, 17-19, or 18-20 polyethylene glycol moieties per protein molecule. Methods for determining the degree of substitution are discussed, for example, in Delgado et al., Crit. Rev. Thera. Drug Carrier Sys. 9:249-304 (1992).

[0206] The polypeptides of the invention can be recovered and purified from chemical synthesis and recombinant cell cultures by standard methods which include, but are not limited to, ammonium sulfate or ethanol precipitation, acid extraction, anion or cation exchange chromatography, phosphocellulose chromatography, hydrophobic interaction chromatography, affinity chromatography, hydroxylapatite chromatography and lectin chromatography. Most preferably, high performance liquid chromatography (“HPLC”) is employed for purification. Well known techniques for refolding protein may be employed to regenerate active conformation when the polypeptide is denatured during isolation and/or purification.

[0207] The polypeptides of the invention may be in monomers or multimers (i.e., dimers, trimers, tetramers and higher multimers). Accordingly, the present invention relates to monomers and multimers of the polypeptides of the invention, their preparation, and compositions (preferably, Therapeutics) containing them. In specific embodiments, the polypeptides of the invention are monomers, dimers, trimers or tetramers. In additional embodiments, the multimers of the invention are at least dimers, at least trimers, or at least tetramers.

[0208] Multimers encompassed by the invention may be homomers or heteromers. As used herein, the term homomer refers to a multimer containing only polypeptides corresponding to a protein of the invention (e.g., the amino acid sequence of SEQ ID NO:Y, an amino acid sequence encoded by SEQ ID NO:X or the complement of SEQ ID NO:X, the amino acid sequence encoded by the portion of SEQ ID NO:X as defined in columns 8 and 9 of Table 2, and/or an amino acid sequence encoded by cDNA contained in Clone ID NO:Z (including fragments, variants, splice variants, and fusion proteins, corresponding to these as described herein)). These homomers may contain polypeptides having identical or different amino acid sequences. In a specific embodiment, a homomer of the invention is a multimer containing only polypeptides having an identical amino acid sequence. In another specific embodiment, a homomer of the invention is a multimer containing polypeptides having different amino acid sequences. In specific embodiments, the multimer of the invention is a homodimer (e.g., containing two polypeptides having identical or different amino acid sequences) or a homotrimer (e.g., containing three polypeptides having identical and/or different amino acid sequences). In additional embodiments, the homomeric multimer of the invention is at least a homodimer, at least a homotrimer, or at least a homotetramer.

[0209] As used herein, the term heteromer refers to a multimer containing one or more heterologous polypeptides (i.e., polypeptides of different proteins) in addition to the polypeptides of the invention. In a specific embodiment, the multimer of the invention is a heterodimer, a heterotrimer, or a heterotetramer. In additional embodiments, the heteromeric multimer of the invention is at least a heterodimer, at least a heterotrimer, or at least a heterotetramer.

[0210] Multimers of the invention may be the result of hydrophobic, hydrophilic, ionic and/or covalent associations and/or may be indirectly linked by, for example, liposome formation. Thus, in one embodiment, multimers of the invention, such as, for example, homodimers or homotrimers, are formed when polypeptides of the invention contact one another in solution. In another embodiment, heteromultimers of the invention, such as, for example, heterotrimers or heterotetramers, are formed when polypeptides of the invention contact antibodies to the polypeptides of the invention (including antibodies to the heterologous polypeptide sequence in a fusion protein of the invention) in solution. In other embodiments, multimers of the invention are formed by covalent associations with and/or between the polypeptides of the invention. Such covalent associations may involve one or more amino acid residues contained in the polypeptide sequence (e.g., that recited in SEQ ID NO:Y, encoded by the portion of SEQ ID NO:X as defined in columns 8 and 9 of Table 2, and/or encoded by the cDNA contained in Clone ID NO:Z). In one instance, the covalent associations are cross-linking between cysteine residues located within the polypeptide sequences which interact in the native (i.e., naturally occurring) polypeptide. In another instance, the covalent associations are the consequence of chemical or recombinant manipulation. Alternatively, such covalent associations may involve one or more amino acid residues contained in the heterologous polypeptide sequence in a fusion protein. In one example, covalent associations are between the heterologous sequence contained in a fusion protein of the invention (see, e.g., U.S. Pat. No. 5,478,925). In a specific example, the covalent associations are between the heterologous sequence contained in a Fc fusion protein of the invention (as described herein). In another specific example, covalent associations of fusion proteins of the invention are between heterologous polypeptide sequence from another protein that is capable of forming covalently associated multimers, such as for example, osteoprotegerin (see, e.g., International Publication NO: WO 98/49305, the contents of which are herein incorporated by reference in its entirety). In another embodiment, two or more polypeptides of the invention are joined through peptide linkers. Examples include those peptide linkers described in U.S. Pat. No. 5,073,627 (hereby incorporated by reference). Proteins comprising multiple polypeptides of the invention separated by peptide linkers may be produced using conventional recombinant DNA technology.

[0211] Another method for preparing multimer polypeptides of the invention involves use of polypeptides of the invention fused to a leucine zipper or isoleucine zipper polypeptide sequence. Leucine zipper and isoleucine zipper domains are polypeptides that promote multimerization of the proteins in which they are found. Leucine zippers were originally identified in several DNA-binding proteins (Landschulz et al., Science 240:1759, (1988)), and have since been found in a variety of different proteins. Among the known leucine zippers are naturally occurring peptides and derivatives thereof that dimerize or trimerize. Examples of leucine zipper domains suitable for producing soluble multimeric proteins of the invention are those described in. PCT application WO 94/10308, hereby incorporated by reference. Recombinant fusion proteins comprising a polypeptide of the invention fused to a polypeptide sequence that dimerizes or trimerizes in solution are expressed in suitable host cells, and the resulting soluble multimeric fusion protein is recovered from the culture supernatant using techniques known in the art.

[0212] Trimeric polypeptides of the invention may offer the advantage of enhanced biological activity. Preferred leucine zipper moieties and isoleucine moieties are those that preferentially form trimers. One example is a leucine zipper derived from lung surfactant protein D (SPD), as described in Hoppe et al. (FEBS Letters 344:191, (1994)) and in U.S. patent application Ser. No. 08/446,922, hereby incorporated by reference. Other peptides derived from naturally occurring trimeric proteins may be employed in preparing trimeric polypeptides of the invention.

[0213] In another example, proteins of the invention are associated by interactions between Flag® polypeptide sequence contained in fusion proteins of the invention containing Flag® polypeptide sequence. In a further embodiment, proteins of the invention are associated by interactions between heterologous polypeptide sequence contained in Flag® fusion proteins of the invention and anti-Flag® antibody.

[0214] The multimers of the invention may be generated using chemical techniques known in the art. For example, polypeptides desired to be contained in the multimers of the invention may be chemically cross-linked using linker molecules and linker molecule length optimization techniques known in the art (see, e.g., U.S. Pat. No. 5,478,925, which is herein incorporated by reference in its entirety). Additionally, multimers of the invention may be generated using techniques known in the art to form one or more inter-molecule cross-links between the cysteine residues located within the sequence of the polypeptides desired to be contained in the multimer (see, e.g., U.S. Pat. No. 5,478,925, which is herein incorporated by reference in its entirety). Further, polypeptides of the invention may be routinely modified by the addition of cysteine or biotin to the C-terminus or N-terminus of the polypeptide and techniques known in the art may be applied to generate multimers containing one or more of these modified polypeptides (see, e.g., U.S. Pat. No. 5,478,925, which is herein incorporated by reference in its entirety). Additionally, techniques known in the art may be applied to generate liposomes containing the polypeptide components desired to be contained in the multimer of the invention (see, e.g., U.S. Pat. No. 5,478,925, which is herein incorporated by reference in its entirety).

[0215] Alternatively, multimers of the invention may be generated using genetic engineering techniques known in the art. In one embodiment, polypeptides contained in multimers of the invention are produced recombinantly using fusion protein technology described herein or otherwise known in the art (see, e.g., U.S. Pat. No. 5,478,925, which is herein incorporated by reference in its entirety). In a specific embodiment, polynucleotides coding for a homodimer of the invention are generated by ligating a polynucleotide sequence encoding a polypeptide of the invention to a sequence encoding a linker polypeptide and then further to a synthetic polynucleotide encoding the translated product of the polypeptide in the reverse orientation from the original C-terminus to the N-terminus (lacking the leader sequence) (see, e.g., U.S. Pat. No. 5,478,925, which is herein incorporated by reference in its entirety). In another embodiment, recombinant techniques described herein or otherwise known in the art are applied to generate recombinant polypeptides of the invention which contain a transmembrane domain (or hydrophobic or signal peptide) and which can be incorporated by membrane reconstitution techniques into liposomes (see, e.g., U.S. Pat. No. 5,478,925, which is herein incorporated by reference in its entirety).

[0216] Antibodies

[0217] Further polypeptides of the invention relate to antibodies and T-cell antigen receptors (TCR) which immunospecifically bind a polypeptide, polypeptide fragment, or variant of the invention (e.g., a polypeptide or fragment or variant of the amino acid sequence of SEQ ID NO:Y or a polypeptide encoded by the cDNA contained in Clone ID No:Z, and/or an epitope, of the present invention) as determined by immunoassays well known in the art for assaying specific antibody-antigen binding. Antibodies of the invention include, but are not limited to, polyclonal, monoclonal, multispecific, human, humanized or chimeric antibodies, single chain antibodies, Fab fragments, F(ab′) fragments, fragments produced by a Fab expression library, anti-idiotypic (anti-Id) antibodies (including, e.g., anti-Id antibodies to antibodies of the invention), intracellularly-made antibodies (i.e., intrabodies), and epitope-binding fragments of any of the above. The term “antibody,” as used herein, refers to immunoglobulin molecules and immunologically active portions of immunoglobulin molecules, i.e., molecules that contain an antigen binding site that immunospecifically binds an antigen. The immunoglobulin molecules of the invention can be of any type (e.g., IgG, IgE, IgM, IgD, IgA and IgY), class (e.g., IgG1, IgG2, IgG3, IgG4, IgA1 and IgA2) or subclass of immunoglobulin molecule. In preferred embodiments, the immunoglobulin molecules of the invention are IGI. In other preferred embodiments, the immunoglobulin molecules of the invention are IgG4.

[0218] Most preferably the antibodies are human antigen-binding antibody fragments of the present invention and include, but are not limited to, Fab, Fab′ and F(ab′)2, Fd, single-chain Fvs (scFv), single-chain antibodies, disulfide-linked Fvs (sdFv) and fragments comprising either a VL or VH domain. Antigen-binding antibody fragments, including single-chain antibodies, may comprise the variable region(s) alone or in combination with the entirety or a portion of the following: hinge region, CH1, CH2, and CH3 domains. Also included in the invention are antigen-binding fragments also comprising any combination of variable region(s) with a hinge region, CH1, CH2, and CH3 domains. The antibodies of the invention may be from any animal origin including birds and mammals. Preferably, the antibodies are human, murine (e.g., mouse and rat), donkey, ship rabbit, goat, guinea pig, camel, horse, or chicken. As used herein, “human” antibodies include antibodies having the amino acid sequence of a human immunoglobulin and include antibodies isolated from human immunoglobulin libraries or from animals transgenic for one or more human immuroglobulin and that do not express endogenous immunoglobulins, as described infra and, for example in, U.S. Pat. No. 5,939,598 by Kucherlapati et al.

[0219] The antibodies of the present invention may be monospecific, bispecific, trispecific or of greater muspecpecificity. Multispecific antibodies may be specific for different epitopes of a polypeptide of the present invention or may be specific for both a polypeptide of the present invention as well as for a heterologous epitope, such as a heterologous polypeptide or solid support material. See, e.g., PCT publications WO 93/17715; WO 92/08802; WO 91/00360; WO 92/05793; Tutt, et al., J. Immunol. 147:60-69 (1991); U.S. Pat. Nos. 4,474,893; 4,714,681; 4,925,648; 5,573,920; 5,601,819; Kostelny et al., J. Immunol. 148:1547-1553 (1992).

[0220] Antibodies of the present invention may be described or specified in terms of the epitope(s) or portion(s) of a polypeptide of the present invention which they recognize or specifically bind. The epitope(s) or polypeptide portion(s) may be specified as described herein, e.g., by N-terminal and C-terminal positions, or by size in contiguous amino acid residues, or listed in the Tables and Figures. Preferred epitopes of the invention include the predicted epitopes shown in column 7 of Table 1A, as well as polynucleotides that encode these epitopes. Antibodies which specifically bind any epitope or polypeptide of the present invention may also be excluded. Therefore, the present invention includes antibodies that specifically bind polypeptides of the present invention, and allows for the exclusion of the same.

[0221] Antibodies of the present invention may also be described or specified in terms of their cross-reactivity. Antibodies that do not bind any other analog, ortholog, or homolog of a polypeptide of the present invention are included. Antibodies that bind polypeptides with at least 95%, at least 90%, at least 85%, at least 80%, at least 75%, at least 70%, at least 65%, at least 60%, at least 55%, and at least 50% identity (as calculated using methods known in the art and described herein) to a polypeptide of the present invention are also included in the present invention. In specific embodiments, antibodies of the present invention cross-react with murine, rat and/or rabbit homologs of human proteins and the corresponding epitopes thereof. Antibodies that do not bind polypeptides with less than 95%, less than 90%, less than 85%, less than 80%, less than 75%, less than 70%, less than 65%, less than 60%, less than 55%, and less than 50% identity (as calculated using methods known in the art and described herein) to a polypeptide of the present invention are also included in the present invention. In a specific embodiment, the above-described cross-reactivity is with respect to any single specific antigenic or immunogenic polypeptide, or combination(s) of 2, 3, 4, 5, or more of the specific antigenic and/or immunogenic polypeptides disclosed herein. Further included in the present invention are antibodies which bind polypeptides encoded by polynucleotides which hybridize to a polynucleotide of the present invention under stringent hybridization conditions (as described herein). Antibodies of the present invention may also be described or specified in terms of their binding affinity to a polypeptide of the invention. Preferred binding affinities include those with a dissociation constant or Kd less than 5×10⁻² M, 10⁻² M, 5×10⁻³ M, 10⁻³M, 5×10⁻⁴M, 10⁻⁴ M, 5×10⁻⁵ M, 10⁻⁵ M, 5×10⁻⁶ M, 10⁻⁶M, 5×10⁻⁷ M, 10⁻⁷ M, 5×10⁻⁸ M, 10⁻⁸ M, 5×10⁻⁹ M, 10⁻⁹ M, 5×10−10 M, 10⁻¹⁰ M, 5×10⁻¹¹ M, 10⁻¹¹ M, 5×10⁻¹² M, 10⁻¹² M, 5×10 ⁻¹³ M, 10⁻¹³ M, 5×10⁻¹⁴ M, 10⁻¹⁴ M, 5×10⁻¹⁵ M, or 10−15 M.

[0222] The invention also provides antibodies that competitively inhibit binding of an antibody to an epitope of the invention as determined by any method known in the art for determining competitive binding, for example, the immunoassays, described herein. In preferred embodiments, the antibody competitively inhibits binding to the epitope by at least 95%, at least 90%, at least 85%, at least 80%, at least 75%, at least 70%, at least 60%, or at least 50%.

[0223] Antibodies of the present invention may act as agonists or antagonists of the polypeptides of the present invention. For example, the present invention includes antibodies which disrupt the receptor/ligand interactions with the polypeptides of the invention either partially or fully. Preferably, antibodies of the present invention bind an antigenic epitope disclosed herein, or a portion thereof. The invention features both receptor-specific antibodies and ligand-specific antibodies. The invention also features receptor-specific antibodies which do not prevent ligand binding but prevent receptor activation. Receptor activation (i.e., signaling) may be determined by techniques described herein or otherwise known in the art. For example, receptor activation can be determined by detecting the phosphorylation (e.g., tyrosine or serine/threonine) of the receptor or its substrate by immunoprecipitation followed by western blot analysis (for example, as described supra). In specific embodiments, antibodies are provided that inhibit ligand activity or receptor activity by at least 95%, at least 90%, at least 85%, at least 80%, at least 75%, at least 70%, at least 60%, or at least 50% of the activity in absence of the antibody.

[0224] The invention also features receptor-specific antibodies which both prevent ligand binding and receptor activation as well as antibodies that recognize the receptor-ligand complex, and, preferably, do not specifically recognize the unbound receptor or the unbound ligand. Likewise, included in the invention are neutralizing antibodies which bind the ligand and prevent binding of the ligand to the receptor, as well as antibodies which bind the ligand, thereby preventing receptor activation, but do not prevent the ligand from binding the receptor. Further included in the invention are antibodies which activate the receptor. These antibodies may act as receptor agonists, i.e., potentiate or activate either all or a subset of the biological activities of the ligand-mediated receptor activation, for example, by inducing dimerization of the receptor. The antibodies may be specified as agonists, antagonists or inverse agonists for biological activities comprising the specific biological activities of the peptides of the invention disclosed herein. The above antibody agonists can be made using methods known in the art. See, e.g., PCT publication WO 96/40281; U.S. Pat. No. 5,811,097; Deng et al., Blood 92(6):1981-1988 (1998); Chen et al., Cancer Res. 58(16):3668-3678 (1998); Harrop et al., J. Immunol. 161(4):1786-1794 (1998); Zhu et al., Cancer Res. 58(15):3209-3214 (1998); Yoon et al., J. Immunol. 160(7):3170-3179 (1998); Prat et al., J. Cell. Sci. 111 (Pt2):237-247 (1998); Pitard et al., J. Immunol. Methods 205(2):177-190 (1997); Liautard et al., Cytokine 9(4):233-241 (1997); Carlson et al., J. Biol. Chem. 272(17):11295-11301 (1997); Taryman et al., Neuron 14(4):755-762 (1995); Muller et al., Structure 6(9):1153-1167 (1998); Bartunek et al., Cytokine 8(l):14-20 (1996) (which are all incorporated by reference herein in their entireties).

[0225] Antibodies of the present invention may be used, for example, to purify, detect, and target the polypeptides of the present invention, including both in vitro and in vivo diagnostic and therapeutic methods. For example, the antibodies have utility in immunoassays for qualitatively and quantitatively measuring levels of the polypeptides of the present invention in biological samples. See, e.g., Harlow et al., Antibodies: A Laboratory Manual, (Cold Spring Harbor Laboratory Press, 2nd ed. 1988); incorporated by reference herein in its entirety.

[0226] As discussed in more detail below, the antibodies of the present invention may be used either alone or in combination with other compositions. The antibodies may further be recombinantly fused to a heterologous polypeptide at the N- or C-terminus or chemically conjugated (including covalent and non-covalent conjugations) to polypeptides or other compositions. For example, antibodies of the present invention may be recombinantly fused or conjugated to molecules useful as labels in detection assays and effector molecules such as heterologous polypeptides, drugs, radionuclides, or toxins See, e.g., PCT publications WO 92/08495; WO 91/14438; WO 89/12624; U.S. Pat. No. 5,314,995; and EP 396,387; the disclosures of which are incorporated herein by reference in their entireties.

[0227] The antibodies of the invention include derivatives that are modified, i.e, by the covalent attachment of any type of molecule to the antibody such that covalent attachment does not prevent the antibody from generating an anti-idiotypic response. For example, but not by way of limitation, the antibody derivatives include antibodies that have been modified, e.g., by glycosylation, acetylation, pegylation, phosphylation, amidation, derivatization by known protecting/blocking groups, proteolytic cleavage, linkage to a cellular ligand or other protein, etc. Any of numerous chemical modifications may be carried out by known techniques, including, but not limited to specific chemical cleavage, acetylation, formylation, metabolic synthesis of tunicamycin, etc. Additionally, the derivative may contain one or more non-classical amino acids.

[0228] The antibodies of the present invention may be generated by any suitable method known in the art. Polyclonal antibodies to an antigen-of-interest can be produced by various procedures well known in the art. For example, a polypeptide of the invention can be administered to various host animals including, but not limited to, rabbits, mice, rats, etc. to induce the production of sera containing polyclonal antibodies specific for the antigen. Various adjuvants may be used to increase the immunological response, depending on the host species, and include but are not limited to, Freund's (complete and incomplete), mineral gels such as aluminum hydroxide, surface active substances such as lysolecithin, pluronic polyols, polyanions, peptides, oil emulsions, keyhole limpet hemocyanins, dinitrophenol, and potentially useful human adjuvants such as BCG (bacille Calmette-Guerin) and corynebacterium parvum. Such adjuvants are also well known in the art.

[0229] Monoclonal antibodies can be prepared using a wide variety of techniques known in the art including the use of hybridoma, recombinant, and phage display technologies, or a combination thereof. For example, monoclonal antibodies can be produced using hybridoma techniques including those known in the art and taught, for example, in Harlow et al., Antibodies: A Laboratory Manual, (Cold Spring Harbor Laboratory Press, 2nd ed. 1988); Hammerling, et al., in: Monoclonal Antibodies and T-Cell Hybridomas 563-681 (Elsevier, N.Y., 1981) (said references incorporated by reference in their entireties). The term “monoclonal antibody” as used herein is not limited to antibodies produced through hybridoma technology. The term “monoclonal antibody” refers to an antibody that is derived from a single clone, including any eukaryotic, prokaryotic, or phage clone, and not the method by which it is produced.

[0230] Methods for producing and screening for specific antibodies using hybridoma technology are routine and well known in the art and are discussed in detail in the Examples. In a non-limiting example, mice can be immunized with a polypeptide of the invention or a cell expressing such peptide. Once an immune response is detected, e.g., antibodies specific for the antigen are detected in the mouse serum, the mouse spleen is harvested and splenocytes isolated. The splenocytes are then fused by well known techniques to any suitable myeloma cells, for example cells from cell line SP20 available from the ATCC. Hybridomas are selected and cloned by limited dilution. The hybridoma clones are then assayed by methods known in the art for cells that secrete antibodies capable of binding a polypeptide of the invention. Ascites fluid, which generally contains high levels of antibodies, can be generated by immunizing mice with positive hybridoma clones.

[0231] Accordingly, the present invention provides methods of generating monoclonal antibodies as well as antibodies produced by the method comprising culturing a hybridoma cell secreting an antibody of the invention wherein, preferably, the hybridoma is generated by fusing splenocytes isolated from a mouse immunized with an antigen of the invention with myeloma cells and then screening the hybridomas resulting from the fusion for hybridoma clones that secrete an antibody able to bind a polypeptide of the invention.

[0232] Another well known method for producing both polyclonal and monoclonal human B cell lines is transformation using Epstein Barr Virus (EBV). Protocols for generating EBV-transformed B cell lines are commonly known in the art, such as, for example, the protocol outlined in Chapter 7.22 of Current Protocols in Immunology, Coligan et al., Eds., 1994, John Wiley & Sons, NY, which is hereby incorporated in its entirety by reference. The source of B cells for transformation is commonly human peripheral blood, but B cells for transformation may also be derived from other sources including, but not limited to, lymph nodes, tonsil, spleen, tumor tissue, and infected tissues. Tissues are generally made into single cell suspensions prior to EBV transformation. Additionally, steps may be taken to either physically remove or inactivate T cells (e.g., by treatment with cyclosporin A) in B cell-containing samples, because T cells from individuals seropositive for anti-EBV antibodies can suppress B cell immortalization by EBV.

[0233] In general, the sample containing human B cells is innoculated with EBV, and cultured for 3-4 weeks. A typical source of EBV is the culture supernatant of the B95-8 cell line (ATCC #VR-1492). Physical signs of EBV transformation can generally be seen towards the end of the 3-4 week culture period. By phase-contrast microscopy, transformed cells may appear large, clear, hairy and tend to aggregate in tight clusters of cells. Initially, EBV lines are generally polyclonal. However, over prolonged periods of cell cultures, EBV lines may become monoclonal or polyclonal as a result of the selective outgrowth of particular B cell clones. Alternatively, polyclonal EBV transformed lines may be subcloned (e.g., by limiting dilution culture) or fused with a suitable fusion partner and plated at limiting dilution to obtain monoclonal B cell lines. Suitable fusion partners for EBV transformed cell lines include mouse myeloma cell lines (e.g., SP2/0,×63-Ag8.653), heteromyeloma cell lines (human×mouse; e.g, SPAM-8, SBC-H20, and CB-F7), and human cell lines (e.g., GM 1500, SKO-007, RPMI 8226, and KR-4). Thus, the present invention also provides a method of generating polyclonal or monoclonal human antibodies against polypeptides of the invention or fragments thereof, comprising EBV-transformation of human B cells.

[0234] Antibody fragments which recognize specific epitopes may be generated by known techniques. For example, Fab and F(ab′)2 fragments of the invention may be produced by proteolytic cleavage of immunoglobulin molecules, using enzymes such as papain (to produce Fab fragments) or pepsin (to produce F(ab′)2 fragments). F(ab′)2 fragments contain the variable region, the light chain constant region and the CH1 domain of the heavy chain.

[0235] For example, the antibodies of the present invention can also be generated using various phage display methods known in the art. In phage display methods, functional antibody domains are displayed on the surface of phage particles which carry the polynucleotide sequences encoding them. In a particular embodiment, such phage can be utilized to display antigen binding domains expressed from a repertoire or combinatorial antibody library (e.g., human or murine). Phage expressing an antigen binding domain that binds the antigen of interest can be selected or identified with antigen, e.g., using labeled antigen or antigen bound or captured to a solid surface or bead. Phage used in these methods are typically filamentous phage including fd and M13 binding domains expressed from phage with Fab, Fv or disulfide stabilized Fv antibody domains recombinantly fused to either the phage gene III or gene VIII protein. Examples of phage display methods that can be used to make the antibodies of the present invention include those disclosed-in Brinkman et al., J. Immunol. Methods 182:41-50 (1995); Ames et al., J. Immunol. Methods 184:177-186 (1995); Kettleborough et al., Eur. J. Immunol. 24:952-958 (1994); Persic et al., Gene 187 9-18 (1997); Burton et al., Advances in Immunology 57:191-280 (1994); PCT application No. PCT/GB91/01134; PCT publications WO 90/02809; WO 91/10737; WO 92/01047; WO 92/18619; WO 93/11236; WO 95/15982; WO 95/20401; and U.S. Pat. Nos. 5,698,426; 5,223,409; 5,403,484; 5,580,717; 5,427,908; 5,750,753; 5,821,047; 5,571,698; 5,427,908; 5,516,637; 5,780,225; 5,658,727; 5,733,743 and 5,969,108; each of which is incorporated herein by reference in its entirety.

[0236] As described in the above references, after phage selection, the antibody coding regions from the phage can be isolated and used to generate whole antibodies, including human antibodies, or any other desired antigen binding fragment, and expressed in any desired host, including mammalian cells, insect cells, plant cells, yeast, and bacteria, e.g., as described in detail below. For example, techniques to recombinantly produce Fab, Fab′ and F(ab′)2 fragments can also be employed using methods known in the art such as those disclosed in PCT publication WO 92/22324; Mullinax et al., BioTechniques 12(6):864-869 (1992); and Sawai et al., AJRI 34:26-34 (1995); and Better et al., Science 240:1041-1043 (1988) (said references incorporated by reference in their entireties).

[0237] Examples of techniques which can be used to produce single-chain Fvs and antibodies include those described in U.S. Pat. Nos. 4,946,778 and 5,258,498; Huston et al., Methods in Enzymology 203:46-88 (1991); Shu et al., PNAS 90:7995-7999 (1993); and Skerra et al., Science 240:1038-1040 (1988). For some uses, including in vivo use of antibodies in humans and in vitro detection assays, it may be preferable to use chimeric, humanized, or human antibodies. A chimeric antibody is a molecule in which different portions of the antibody are derived from different animal species, such as antibodies having a variable region derived from a murine monoclonal antibody and a human immunoglobulin constant region. Methods for producing chimeric antibodies are known in the art. See e.g., Morrison, Science 229:1202 (1985); Oi et al., BioTechniques 4:214 (1986); Gillies et al., (1989) J. Immunol. Methods 125:191-202; U.S. Pat. Nos. 5,807,715; 4,816,567; and 4,816397, which are incorporated herein by reference in their entirety. Humanized antibodies are antibody molecules from non-human species antibody that binds the desired antigen having one or more complementarity determining regions (CDRs) from the non-human species and a framework regions from a human immunoglobulin molecule. Often, framework residues in the human framework regions will be substituted with the corresponding residue from the CDR donor antibody to alter, preferably improve, antigen binding. These framework substitutions are identified by methods well known in the art, e.g., by modeling of the interactions of the CDR and framework residues to identify framework residues important for antigen binding and sequence comparison to identify unusual framework residues at particular positions. (See, e.g., Queen et al., U.S. Pat. No. 5,585,089; Riechmann et al., Nature 332:323 (1988), which are incorporated herein by reference in their entireties.) Antibodies can be humanized using a variety of techniques known in the art including, for example, CDR-grafting (EP 239,400; PCT publication WO 91/09967; U.S. Pat. Nos. 5,225,539; 5,530,101; and 5,585,089), veneering or resurfacing (EP 592,106; EP 519,596; Padlan, Molecular Immunology 28(4/5):489-498 (1991); Studnicka et al., Protein Engineering 7(6):805-814 (1994); Roguska. et al., PNAS 91:969-973 (1994)), and chain shuffling (U.S. Pat. No. 5,565,332).

[0238] Completely human antibodies are particularly desirable for therapeutic treatment of human patients. Human antibodies can be made by a variety of methods known in the art including phage display methods described above using antibody libraries derived from human immunoglobulin sequences. See also, U.S. Pat. Nos. 4,444,887 and 4,716,11 1; and PCT publications WO 98/46645, WO 98/50433, WO 98/24893, WO 98/16654, WO 96/34096, WO 96/33735, and WO 91/10741; each of which is incorporated herein by reference in its entirety.

[0239] Human antibodies can also be produced using transgenic mice which are incapable of expressing functional endogenous immunogtobulins, but which can express human immunoglobulin genes. For example, the human heavy and light chain immunoglobulin gene complexes may be introduced randomly or by homologous recombination into mouse embryonic stem cells. Alternatively, the human variable region, constant region, and diversity region may be introduced into mouse embryonic stem cells in addition to the human heavy and light chain genes. The mouse heavy and light chain immunoglobulin genes may be rendered non-functional separately or simultaneously with the introduction of human immunoglobulin loci by homologous recombination. In particular, homozygous deletion of the JH region prevents endogenous antibody production. The modified embryonic stem cells are expanded and microinjected into blastocysts to produce chimeric mice. The chimeric mice are then bred to produce homozygous offspring which express human antibodies. The transgenic mice are immunized in the normal fashion with a selected antigen, e.g., all or a portion of a polypeptide of the invention. Monoclonal antibodies directed against the antigen can be obtained from the immunized, transgenic mice using conventional hybridoma technology. The human immunoglobulin transgenes harbored by the transgenic mice rearrange during B cell differentiation, and subsequently undergo class switching and somatic mutation. Thus, using such a technique, it is possible to produce therapeutically useful IgG, IgA, IgM and IgE antibodies. For an overview of this technology for producing human antibodies, see Lonberg and Huszar, Int. Rev. Immunol. 13:65-93 (1995). For a detailed discussion of this technology for producing human antibodies and human monoclonal antibodies and protocols for producing such antibodies, see, e.g., PCT publications WO 98/24893; WO 92/01047; WO 96/34096; WO 96/33735; European Patent No. 0 598 877; U.S. Pat. Nos. 5,413,923; 5,625,126; 5,633,425; 5,569,825; 5,661,016; 5,545,806; 5,814,318; 5,885,793; 5,916,771; 5,939,598; 6,075,181; and 6,114,598, which are incorporated by reference herein in their entirety. In addition, companies such as Abgenix, Inc. (Freemont, Calif.) and Genpharm (San Jose, Calif.) can be engaged to provide human antibodies directed against a selected antigen using technology similar to that described above.

[0240] Completely human antibodies which recognize a selected epitope can be generated using a technique referred to as “guided selection.” In this approach a selected non-human monoclonal antibody, e.g., a mouse antibody, is used to guide the selection of a completely human antibody recognizing the same epitope. (Jespers et al., Bio/technology 12:899-903 (1988)).

[0241] Further, antibodies to the polypeptides of the invention can, in turn, be utilized to generate anti-idiotype antibodies that “mimic” polypeptides of the invention using techniques well known to those skilled in the art. (See, e.g., Greenspan & Bona, FASEB J. 7(5):437-444; (1989) and Nissinoff, J. Immunol. 147(8):2429-2438 (1991)). For example, antibodies which bind to and competitively inhibit polypeptide multimerization and/or binding of a polypeptide of the invention to a ligand can be used to generate anti-idiotypes that “mimic” the polypeptide multimerization and/or binding domain and, as a consequence, bind to and neutralize polypeptide and/or its ligand. Such neutralizing anti-idiotypes or Fab fragments of such anti-idiotypes can be used in therapeutic regimens to neutralize polypeptide ligand(s)/receptor(s). For example, such anti-idiotypic antibodies can be used to bind a polypeptide of the invention and/or to bind its ligand(s)/receptor(s), and thereby block its biological activity. Alternatively, antibodies which bind to and enhance polypeptide multimerization and/or binding, and/or receptor/ligand multimerization, binding and/or signaling can be used to generate anti-idiotypes that function as agonists of a polypeptide of the invention and/or its ligand/receptor. Such agonistic anti-idiotypes or Fab fragments of such anti-idiotypes can be used in therapeutic regimens as agonists of the polypeptides of the invention or its ligand(s)/receptor(s). For example, such anti-idiotypic antibodies can be used to bind a polypeptide of the invention and/or to bind its ligand(s)/receptor(s), and thereby promote or enhance its biological activity.

[0242] Intrabodies of the invention can be produced using methods known in the art, such as those disclosed and reviewed in Chen et al., Hum. Gene Ther. 5:595-601 (1994); Marasco, W. A., Gene Ther. 4:11-15 (1997); Rondon and Marasco, Annu. Rev. Microbiol. 51:257-283 (1997); Proba et al., J. Mol. Biol. 275:245-253 (1998); Cohen et al., Oncogene 17:2445-2456 (1998); Ohage and Steipe, J. Mol. Biol. 291:1119-1128 (1999); Ohage et al., J. Mol. Biol. 291:1129-1134 (1999); Wirtz and Steipe, Protein Sci. 8:2245-2250 (1999); Zhu et al., J. Imrniunol. Methods 231:207-222 (1999); and references cited therein.

[0243] Polynucleotides Encoding Antibodies

[0244] The invention further provides polynucleotides comprising a nucleotide sequence encoding an antibody of the invention and fragments thereof. The invention also encompasses polynucleotides that hybridize under stringent or alternatively, under lower stringency hybridization conditions, e.g., as defined supra, to polynucleotides that encode an antibody, preferably, that specifically binds to a polypeptide of the invention, preferably, an antibody that binds to a polypeptide having the amino acid sequence of SEQ ID NO:Y, to a polypeptide encoded by a portion of SEQ ID NO:X as defined in columns 8 and 9 of Table 2, and/or to a polypeptide encoded by the cDNA contained in Clone ID NO:Z.

[0245] The polynucleotides may be obtained, and the nucleotide sequence of the polynucleotides determined, by any method known in the art. For example, if the nucleotide sequence of the antibody is known, a polynucleotide encoding the antibody may be assembled from chemically synthesized oligonucleotides (e.g., as described in Kutmeier et al., BioTechniques 17:242 (1994)), which, briefly, involves the synthesis of overlapping oligonucleotides containing portions of the sequence encoding the antibody, annealing and ligating of those oligonucleotides, and then amplification of the ligated oligonucleotides by PCR.

[0246] Alternatively, a polynucleotide encoding an antibody may be generated from nucleic acid from a suitable source. If a clone containing a nucleic acid encoding a particular antibody is not available, but the sequence of the antibody molecule is known, a nucleic acid encoding the immunoglobulin may be chemically synthesized or obtained from a suitable source (e.g., an antibody cDNA library, or a cDNA library generated from, or nucleic acid, preferably poly A+ RNA, isolated from, any tissue or cells expressing the antibody, such as hybridoma cells selected to express an antibody of the invention) by PCR amplification using synthetic primers hybridizable to the 3′ and 5′ ends of the sequence or by cloning using an oligonucleotide probe specific for the particular gene sequence to identify, e.g., a cDNA clone from a cDNA library that encodes the antibody. Amplified nucleic acids generated by PCR may then be cloned into replicable cloning vectors using any method well known in the art.

[0247] Once the nucleotide sequence and corresponding amino acid sequence of the antibody is determined, the nucleotide sequence of the antibody may be manipulated using methods well known in the art for the manipulation of nucleotide sequences, e.g., recombinant DNA techniques, site directed mutagenesis, PCR, etc. (see, for example, the techniques described in Sambrook et al., 1990, Molecular Cloning, A Laboratory Manual, 2d Ed., Cold Spring Harbor Laboratory, Cold Spring Harbor, NY and Ausubel et al., eds., 1998, Current Protocols in Molecular Biology, John Wiley & Sons, NY, which are both incorporated by reference herein in their entireties), to generate antibodies having a different amino acid sequence, for example to create amino acid substitutions, deletions, and/or insertions.

[0248] In a specific embodiment, the amino acid sequence of the heavy and/or light chain variable domains may be inspected to identify the sequences of the complementarity determining regions (CDRs) by methods that are well know in the art, e.g., by comparison to known amino acid sequences of other heavy and light chain variable regions to determine the regions of sequence hypervariability. Using routine recombinant DNA techniques, one or more of the CDRs may be inserted within framework regions, e.g., into human framework regions to humanize a non-human antibody, as described supra. The framework regions may be naturally occurring or consensus framework regions, and preferably human framework regions (see, e.g., Chothia et al., J. Mol. Biol. 278: 457-479 (1998) for a listing of human framework regions). Preferably, the polynucleotide generated by the combination of the framework regions and CDRs encodes an antibody that specifically binds a polypeptide of the invention. Preferably, as discussed supra, one or more amino acid substitutions may be made within the framework regions, and, preferably, the amino acid substitutions improve binding of the antibody to its antigen. Additionally, such methods may be used to make amino acid substitutions or deletions of one or more variable region cysteine residues participating in an intrachain disulfide bond to generate antibody molecules lacking one or more intrachain disulfide bonds. Other alterations to the polynucleotide are encompassed by the present invention and within the skill of the art.

[0249] In addition, techniques developed for the production of “chimeric antibodies” (Morrison et al., Proc. Natl. Acad. Sci. 81:851-855 (1984); Neuberger et al., Nature 312:604-608 (1984); Takeda et al., Nature 314:452-454 (1-985)) by splicing genes from a mouse antibody molecule of appropriate antigen specificity together with genes from a human antibody molecule of appropriate biological activity can be used. As described supra, a chimeric antibody is a molecule in which different portions are derived from different animal species, such as those having a variable region derived from a murine mAb and a human immunoglobulin constant region, e.g., humanized antibodies.

[0250] Alternatively, techniques described for the production of single chain antibodies (U.S. Pat. No. 4,946,778; Bird, Science 242:423-42 (1988); Huston et al., Proc. Natl. Acad. Sci. USA 85:5879-5883 (1988); and Ward et al., Nature 334:544-54 (1989)) can be adapted to produce single chain antibodies. Single chain antibodies are formed by linking the heavy and light chain fragments of the Fv region via an amino acid bridge, resulting in a single chain polypeptide. Techniques for the assembly of functional Fv fragments in E. coli may also be used (Skerra et al., Science 242:1038-1041 (1988)).

[0251] Methods of Producing Antibodies

[0252] The antibodies of the invention can be produced by any method known in the art for the synthesis of antibodies, in particular, by chemical synthesis or preferably, by recombinant expression techniques. Methods of producing antibodies include, but are not limited to, hybridoma technology, EBV transformation, and other methods discussed herein as well as through the use recombinant DNA technology, as discussed below.

[0253] Recombinant expression of an antibody of the invention, or fragment, derivative or analog thereof, (e.g., a heavy or light chain of an antibody of the invention or a single chain antibody of the invention), requires construction of an expression vector containing a polynucleotide that encodes the antibody. Once a polynucleotide encoding an antibody molecule or a heavy or light chain of an antibody, or portion thereof (preferably containing the heavy or light chain variable domain), of the invention has been obtained, the vector for the production of the antibody molecule may be produced by recombinant DNA technology using techniques well known in the art. Thus, methods for preparing a protein by expressing a polynucleotide containing an antibody encoding nucleotide sequence are described herein. Methods which are well known to those skilled in the art can be used to construct expression vectors containing antibody coding sequences and appropriate transcriptional and translational control signals. These methods include, for example, in vitro recombinant DNA techniques, synthetic techniques, and in vivo genetic recombination. The invention, thus, provides replicable vectors comprising a nucleotide sequence encoding an antibody molecule of the invention, or a heavy or light chain thereof, or a heavy or light chain variable domain, operably linked to a promoter. Such vectors may include the nucleotide sequence encoding the constant region of the antibody molecule (see, e.g., PCT Publication WO 86/05807; PCT Publication WO 89/01036; and U.S. Pat. No. 5,122,464) and the variable domain of the antibody may be cloned into such a vector for expression of the entire heavy or light chain.

[0254] The expression vector is transferred to a host cell by conventional techniques and the transfected cells are then cultured by conventional techniques to produce an antibody of the invention. Thus, the invention includes host cells containing a polynucleotide encoding an antibody of the invention, or a heavy or light chain thereof, or a single chain antibody of the invention, operably linked to a heterologous promoter. In preferred embodiments for the expression of double-chained antibodies, vectors encoding both the heavy and light chains may be co-expressed in the host cell for expression of the entire immunoglobulin molecule, as detailed below.

[0255] A variety of host-expression vector systems may be utilized to express the antibody molecules of the invention. Such host-expression systems represent vehicles by which the coding sequences of interest may be produced and subsequently purified, but also represent cells which may, when transformed or transfected with the appropriate nucleotide coding sequences, express an antibody molecule of the invention in situ. These include but are not limited to microorganisms such as bacteria (e.g., E. coli, B. subtilis) transformed with recombinant bacteriophage DNA, plasmid DNA or cosmid DNA expression vectors containing antibody coding sequences; yeast (e.g., Saccharomyces, Pichia) transformed with recombinant yeast expression vectors containing antibody coding sequences; insect cell systems infected with recombinant virus expression vectors (e.g., baculovirus) containing antibody coding sequences; plant cell systems infected with recombinant virus expression vectors (e.g., cauliflower mosaic virus, CaMV; tobacco mosaic virus, TMV) or transformed with recombinant plasmid expression vectors (e.g., Ti plasmid) containing antibody coding sequences; or mammalian cell systems (e.g., COS, CHO, BHK, 293, 3T3 cells) harboring recombinant expression constructs containing promoters derived from the genome of mammalian cells (e.g., metallothionein promoter) or from mammalian viruses (e.g., the adenovirus late promoter; the vaccinia virus 7.5K promoter). Preferably, bacterial cells such as Escherichia coli, and more preferably, eukaryotic cells, especially for the expression of whole recombinant antibody molecule, are used for the expression of a recombinant antibody molecule. For example, mammalian cells such as Chinese hamster ovary cells (CHO), in conjunction with a vector such as the major intermediate early gene promoter element from human cytomegalovirus is an effective expression system for antibodies (Foecking et al., Gene 45.101 (1986); Cockett et al., Bio/Technology 8:2 (1990)).

[0256] In bacterial systems, a number of expression vectors may be advantageously selected depending upon the use intended for the antibody molecule being expressed. For example, when a large quantity of such a protein is to be produced, for the generation of pharmaceutical compositions of an antibody molecule, vectors which direct the expression of high levels of fusion protein products that are readily purified may be desirable. Such vectors include, but are not limited, to the E. coli expression vector pUR278 (Ruther et al., EMBO J. 2:1791 (1983)), in which the antibody coding sequence may be ligated individually into the vector in frame with the lac Z coding region so that a fusion protein is produced; pIN vectors (Inouye & Inouye, Nucleic Acids Res. 13:3101-3109 (1985); Van Heeke & Schuster, J. Biol. Chem. 24:5503-5509 (1989)); and the like. pGEX vectors may also be used to express foreign polypeptides as fusion proteins with glutathione S-transferase (GST). In general, such fusion proteins are soluble and can easily be purified from lysed cells by adsorption and binding to matrix glutathione-agarose beads followed by elution in the presence of free glutathione. The pGEX vectors are designed to include thrombin or factor Xa protease cleavage sites so that the cloned target gene product can be released from the GST moiety.

[0257] In an insect system, Autographa califomica nuclear polyhedrosis virus (AcNPV) is used as a vector to express foreign genes. The virus grows in Spodoptera frugiperda cells. The antibody coding sequence may be cloned individually into non-essential regions (for example the polyhedrin gene) of the virus and placed under control of an AcNPV promoter (for example the polyhedrin promoter).

[0258] In mammalian host cells, a number of viral-based expression systems may be utilized. In cases where an adenovirus is used as an expression vector, the antibody coding sequence of interest may be ligated to an adenovirus transcription/translation control complex, e.g., the late promoter and tripartite leader sequence. This chimeric gene may then be inserted in the adenovirus genome by in vitro or in vivo recombination. Insertion in a non-essential region of the viral genome (e.g., region E1 or E3) will result in a recombinant virus that is viable and capable of expressing the antibody molecule in infected hosts. (e.g., see Logan & Shenk, Proc. Natl. Acad. Sci. USA 81:355-359 (1984)). Specific initiation signals may also be required for efficient translation of inserted antibody coding sequences. These signals include the ATG initiation codon and adjacent sequences. Furthermore, the initiation codon must be in phase with the reading frame of the desired coding sequence to ensure translation of the entire insert. These exogenous translational control signals and initiation codons can be of a variety of origins, both natural and synthetic. The efficiency of expression may be enhanced by the inclusion of appropriate transcription enhancer elements, transcription terminators, etc. (see Bittner et al., Methods in Enzymol. 153:51-544 (1987)).

[0259] In addition, a host cell strain may be chosen which modulates the expression of the inserted sequences, or modifies and processes the gene product in the specific fashion desired. Such modifications (e.g., glycosylation) and processing (e.g., cleavage) of protein products may be important for the function of the protein. Different host cells have characteristic and specific mechanisms for the post-translational processing and modification of proteins and gene products. Appropriate cell lines or host systems can be chosen to ensure the correct modification and processing of the foreign protein expressed. To this end, eukaryotic host cells which possess the cellular machinery for proper processing of the primary transcript, glycosylation, and phosphorylation of the gene product may be used. Such mammalian host cells include but are not limited to CHO, VERY, BHK, Hela, COS, MDCK, 293, 3T3, W138, and in particular, breast cancer cell lines such as, for example, BT483, Hs578T, HTB2, BT20 and T47D, and normal mammary gland cell line such as, for example, CRL7030 and Hs578Bst.

[0260] For long-term, high-yield production of recombinant proteins, stable expression is preferred. For example, cell lines which stably express the antibody molecule may be engineered. Rather than using expression vectors which contain viral origins of replication, host cells can be transformed with DNA controlled by appropriate expression control elements (e.g., promoter, enhancer, sequences, transcription terminators, polyadenylation sites, etc.), and a selectable marker. Following the introduction of the foreign DNA, engineered cells may be allowed to grow for 1-2 days in an enriched media, and then are switched to a selective media. The selectable marker in the recombinant plasmid confers resistance to the selection and allows cells to stably integrate the plasmid into their chromosomes and grow to form foci which in turn can be cloned and expanded into cell lines. This method may advantageously be used to engineer cell lines which express the antibody molecule. Such engineered cell lines may be particularly useful in screening and evaluation of compounds that interact directly or indirectly with the antibody molecule.

[0261] A number of selection systems may be used, including but not limited to the herpes simplex virus thymidine kinase (Wigler et al., Cell 11:223 (1977)), hypoxanthine-guanine phosphoribosyltransferase (Szybalska & Szybalski, Proc. Natl. Acad. Sci. USA 48:202 (1992)), and adenine phosphoribosyltransferase (Lowy et al., Cell 22:817 (1980)) genes can be employed in tk-, hgprt- or aprt- cells, respectively. Also, antimetabolite resistance can be used as the basis of selection for the following genes: dhfr, which confers resistance to methotrexate (Wigler et al., Natl. Acad. Sci. USA 77:357 (1980); O'Hare et al., Proc. Natl. Acad. Sci. USA 78:1527 (1981)); gpt, which confers resistance to mycophenolic acid (Mulligan & Berg, Proc. Natl. Acad. Sci. USA 78:2072 (1981)); neo, which confers resistance to the aminoglycoside G-418 Clinical Pharmacy 12:488-505; Wu and Wu, Biotherapy 3:87-95 (1991); Tolstoshev, Ann. Rev. Pharmacol. Toxicol. 32:573-596 (1993); Mulligan, Science 260:926-932 (1993); and Morgan and Anderson, Ann. Rev. Biochem. 62:191-217 (1993); May, 1993, TIB TECH 11(5):155-215 (1993)); and hygro, which confers resistance to hygromycin (Santerre et al., Gene 30:147 (1984)). Methods commonly known in the art of recombinant DNA technology may be routinely applied to select the desired recombinant clone, and such methods are described, for example, in Ausubel et al. (eds.), Current Protocols in Molecular Biology, John Wiley & Sons, NY (1993); Kriegler, Gene Transfer and Expression, A Laboratory Manual, Stockton Press, NY (1990); and in Chapters 12 and 13, Dracopoli et al. (eds), Current Protocols in Human Genetics, John Wiley & Sons, NY (1994); Colberre-Garapin et al., J. Mol. Biol. 150:1 (1981), which are incorporated by reference herein in their entireties.

[0262] The expression levels of an antibody molecule can be increased by vector amplification (for a review, see Bebbington and Hentschel, The use of vectors based on gene amplification for the expression of cloned genes in mammalian cells in DNA cloning, Vol.3. (Academic Press, New York, 1987)). When a marker in the vector system expressing antibody is amplifiable, increase in the level of inhibitor present in culture of host cell will increase the number of copies of the marker gene. Since the amplified region is associated with the antibody gene, production of the antibody will also increase (Crouse et al., Mol. Cell. Biol. 3:257 (1983)).

[0263] Vectors which use glutamine synthase (GS) or DHFR as the selectable markers can be amplified in the presence of the drugs methionine sulphoximine or methotrexate, respectively. An advantage of glutamine synthase based vectors are the availabilty of cell lines (e.g., the murine myeloma cell line, NSO) which are glutamine synthase negative. Glutamine synthase expression systems can also function in glutamine synthase expressing cells (e.g. Chinese Hamster Ovary (CHO) cells) by providing additional inhibitor to prevent the functioning of the endogenous gene. A glutamine synthase expression system and components thereof are detailed in PCT publications: WO87/04462; WO86/05807; WO89/01036; WO89/10404; and WO91/06657 which are incorporated in their entireties by reference herein. Additionally, glutamine synthase expression vectors that may be used according to the present invention are commercially available from suplliers, including, for example Lonza Biologics, Inc. (Portsmouth, N.H.). Expression and production of monoclonal antibodies using a GS expression system in murine myeloma cells is described in Bebbington et al., Bio/technology 10:169(1992) and in Biblia and Robinson Biotechnol. Prog. 11:1 (1995) which are incorporated in their entirities by reference herein.

[0264] The host cell may be co-transfected with two expression vectors of the invention, the first vector encoding a heavy chain derived polypeptide and the second vector encoding a light chain derived polypeptide. The two vectors may contain identical selectable markers which enable equal expression of heavy and light chain polypeptides. Alternatively, a single vector may be used which encodes, and is capable of expressing, both heavy and light chain polypeptides. In such situations, the light chain should be placed before the heavy chain to avoid an excess of toxic free heavy chain (Proudfoot, Nature 322:52 (1986); Kohler, Proc. Natl. Acad. Sci. USA 77:2197 (1980)). The coding sequences for the heavy and light chains may comprise cDNA or genomic DNA.

[0265] Once an antibody molecule of the invention has been produced by an animal, chemically synthesized, or recombinantly expressed, it may be purified by any method known in the art for purification of an immunoglobulin molecule, for example, by chromatography (e.g., ion exchange, affinity, particularly by affinity for the specific antigen after Protein A, and sizing column chromatography), centrifugation, differential solubility, or by any other standard technique for the purification of proteins. In addition, the antibodies of the present invention or fragments thereof can be fused to heterologous polypeptide sequences described herein or otherwise known in the art, to facilitate purification.

[0266] The present invention encompasses antibodies recombinantly fused or chemically conjugated (including both covalently and non-covalently conjugations) to a polypeptide (or portion thereof, preferably at least 10, 20, 30, 40, 50, 60, 70, 80, 90 or 100 amino acids of the polypeptide) of the present invention to generate fusion proteins. The fusion does not necessarily need to be direct, but may occur through linker sequences. The antibodies may be specific for antigens other than polypeptides (or portion thereof, preferably at least 10, 20, 30, 40, 50, 60, 70, 80, 90 or 100 amino acids of the polypeptide) of the present invention. For example, antibodies may be used to target the polypeptides of the present invention to particular cell types, either in vitro or in vivo, by fusing or conjugating the polypeptides of the present invention to antibodies specific for particular cell surface receptors. Antibodies fused or conjugated to the polypeptides of the present invention may also be used in in vitro immunoassays and purification methods using methods known in the art. See e.g., Harbor et al., supra, and PCT publication WO 93/21232; EP 439,095; Naramura et al., Immunol. Lett. 39:91-99 (1994); U.S. U.S. Pat. No. 5,474,981; Gillies et al., PNAS 89:1428-1432 (1992); Fell et al., J. Immunol. 146:2446-2452 (1991), which are incorporated by reference in their entireties.

[0267] The present invention further includes compositions comprising the polypeptides of the present invention fused or conjugated to antibody domains other than the variable regions. For example, the polypeptides of the present invention may be fused or conjugated to an antibody Fc region, or portion thereof. The antibody portion fused to a polypeptide of the present invention may comprise the constant region, hinge region, CH1 domain, CH2 domain, and CH3 domain or any combination of whole domains or portions thereof. The polypeptides may also be fused or conjugated to the above antibody portions to form multimers. For example, Fc portions fused to the polypeptides of the present invention can form dimers through disulfide bonding between the Fc portions. Higher multimeric forms can be made by fusing the polypeptides to portions of IgA and IgM. Methods for fusing or conjugating the polypeptides of the present invention to antibody portions are known in the art. See, e.g., U.S. Pat. Nos. 5,336,603; 5,622,929; 5,359,046; 5,349,053; 5,447,851; 5,112,946; EP 307,434; EP 367,166; PCT publications WO 96/04388; WO 91/06570; Ashkenazi et al., Proc. Natl. Acad. Sci. USA 88:10535-10539 (1991); Zheng et al., J. Immunol. 154:5590-5600 (1995); and Vil et al., Proc. Natl. Acad. Sci. USA 89:11337-11341 (1992) (said references incorporated by reference in their entireties).

[0268] As discussed, supra, the polypeptides corresponding to a polypeptide, polypeptide fragment, or a variant of SEQ ID NO:Y may be fused or conjugated to the above antibody portions to increase the in vivo half life of the polypeptides or for use in immunoassays using methods known in the art. Further, the polypeptides corresponding to SEQ ID NO:Y may be fused or conjugated to the above antibody portions to facilitate purification. One reported example describes chimeric proteins consisting of the first two domains of the human CD4-polypeptide and various domains of the constant regions of the heavy or light chains of mammalian immunoglobulins. See EP 394,827; and Traunecker et al., Nature 331:84-86 (1988). The polypeptides of the present invention fused or conjugated to an antibody having disulfide-linked dimeric structures (due to the IgG) may also be more efficient in binding and neutralizing other molecules, than the monomeric secreted protein or protein fragment alone. See, for example, Fountoulakis et al., J. Biochem. 270:3958-3964 (1995). In many cases, the Fc part in a fusion protein is beneficial in therapy and diagnosis, and thus can result in, for example, improved pharmacokinetic properties. See, for example, EP A 232,262. Alternatively, deleting the Fc part after the fusion protein has been expressed, detected, and purified, would be desired. For example, the Fc portion may hinder therapy and diagnosis if the fusion protein is used as an antigen for immunizations. In drug discovery, for example, human proteins, such as hIL-5, have been fused with Fc portions for the purpose of high-throughput screening assays to identify antagonists of hIL-5. (See, Bennett et al., J. Molecular Recognition 8:52-58 (1995); Johanson et al., J. Biol. Chem. 270:9459-9471 (1995)).

[0269] Moreover, the antibodies or fragments thereof of the present invention can be ifused to marker sequences, such as a peptide to facilitate purification. In preferred embodiments, the marker amino acid sequence is a hexa-histidine peptide, such as the tag provided in a pQE vector (QIAGEN, Inc., 9259 Eton Avenue, Chatsworth, Calif., 91311), among others, many of which are commercially available. As described in Gentz et al., Proc. Natl. Acad. Sci. USA 86:821-824 (1989), for instance, hexa-histidine provides for convenient purification of the fusion protein. Other peptide tags useful for purification include, but are not limited to, the “HA” tag, which corresponds to an epitope derived from the influenza hemagglutinin protein (Wilson et al., Cell 37:767 (1984)) and the “flag” tag.

[0270] The present invention further encompasses antibodies or fragments thereof conjugated to a diagnostic or therapeutic agent. The antibodies can be used diagnostically to, for example, monitor the development or progression of a tumor as part of a clinical testing procedure to, e.g., determine the efficacy of a given treatment regimen. Detection can be facilitated by coupling the antibody to a detectable substance. Examples of detectable substances include various enzymes, prosthetic groups, fluorescent materials, luminescent materials, bioluminescent materials, radioactive materials, positron emitting metals using various positron emission tomographies, and nonradioactive paramagnetic metal ions. The detectable substance may be coupled or conjugated either directly to the antibody (or fragment thereof) or indirectly, through an intermediate (such as, for example, a linker known in the art) using techniques known in the art. See, for example, U.S. Pat. No. 4,741,900 for metal ions which can be conjugated to antibodies for use as diagnostics according to the present invention. Examples of suitable enzymes include horseradish peroxidase, alkaline phosphatase, beta-galactosidase, or acetylcholinesterase; examples of suitable prosthetic group complexes include streptavidin/biotin and avidin/biotin; examples of suitable fluorescent materials include umbelliferone, fluorescein, fluorescein isothlocyanate, rhodamine, dichlorotriazinylamine fluorescein, dansyl chloride or phycoerythrin; an example of a luminescent material includes luminol; examples of bioluminescent materials include luciferase, luciferin, and aequorin; and examples of suitable radioactive material include 125I, 131I, 111n or 99Tc.

[0271] Further, an antibody or fragment thereof may be conjugated to a therapeutic moiety such as a cytotoxin, e.g., a cytostatic or cytocidal agent, a therapeutic agent or a radioactive metal ion, e.g., alpha-emitters such as, for example, 213Bi. A cytotoxin or cytotoxic agent includes any agent that is detrimental to cells. Examples include paclitaxol, cytochalasin B, gramicidin D, ethidium bromide, emetine, mitomycin, etoposide, tenoposide, vincristine, vinblastine, colchicin, doxorubicin, daunorubicin, dihydroxy anthracin dione, mitoxantrone, mithramycin, actinomycin D, 1-dehydrotestosterone, glucocorticoids, procaine, tetracaine, lidocaine, propranolol, and puromycin and analogs or homologs thereof. Therapeutic agents include, but are not limited to, antimetabolites (e.g., methotrexate, 6-mercaptopurine, 6-thioguanine, cytarabine, 5-fluorouracil decarbazine), alkylating agents (e.g., mechlorethamine, thioepa chlorambucil, melphalan, carmustine (BSNU) and lomustine (CCNU), cyclothosphamide, busulfan, dibromomannitol, streptozotocin, mitomycin C, and cis-dichlorodiamine platinum (II) (DDP) cisplatin), anthracyclines (e.g., daunorubicin (formerly daunomycin) and doxorubicin), antibiotics (e.g., dactinomycin (formerly actinomycin), bleomycin, mithramycin, and anthramycin (AMC)), and anti-mitotic agents (e.g., vincristine and vinblastine).

[0272] The conjugates of the invention can be used for modifying a given biological response, the therapeutic agent or drug moiety is not to be construed as limited to classical chemical therapeutic agents. For example, the drug moiety may be a protein or polypeptide possessing a desired biological activity. Such proteins may include, for example, a toxin such as abrin, ricin A, pseudomonas exotoxin, or diphtheria toxin; a protein such as tumor necrosis factor, a-interferon, B-interferon, nerve growth factor, platelet derived growth factor, tissue plasminogen activator, an apoptotic agent, e.g., TNF-alpha, TNF-beta, AIM I (See, International Publication No. WO 97/33899), AIM II (See, International Publication No. WO 97/34911), Fas Ligand (Takahashi et al., Int. Immunol., 6:1567-1574 (1994)), VEGI (See, International Publication No. WO 99/23105), a thrombotic agent or an anti-angiogenic agent, e.g., angiostatin or endostatin; or, biological response modifiers such as, for example, lymphokines, interleukin-1 (“IL-1”), interleukin-2 (“IL-2”), interleukin-6 (“IL-6”), granulocyte macrophage colony stimulating factor (“GM-CSF”), granulocyte colony stimulating factor (“G-CSF”), or other growth factors.

[0273] Antibodies may also be attached to solid supports, which are particularly useful for immunoassays or purification of the target antigen. Such solid supports include, but are not limited to, glass, cellulose, polyacrylamide, nylon, polystyrene, polyvinyl chloride or polypropylene.

[0274] Techniques for conjugating such therapeutic moiety to antibodies are well known. See, for example, Arnon et al., “Monoclonal Antibodies For Immunotargeting Of Drugs In Cancer Therapy”, in Monoclonal Antibodies And Cancer Therapy, Reisfeld et al. (eds.), pp. 243-56 (Alan R. Liss, Inc. 1985); Hellstrom et al., “Antibodies For Drug Delivery”, in Controlled Drug Delivery (2nd Ed.), Robinson et al. (eds.), pp. 623-53 (Marcel Dekker, Inc. 1987); Thorpe, “Antibody Carriers Of Cytotoxic Agents In Cancer Therapy: A Review”, in Monoclonal Antibodies '84: Biological And Clinical Applications, Pinchera et al. (eds.), pp. 475-506 (1985); “Analysis, Results, And Future Prospective Of The Therapeutic Use Of Radiolabeled Antibody In Cancer Therapy”, in Monoclonal Antibodies For Cancer Detection And Therapy, Baldwin et al. (eds.), pp. 303-16 (Academic Press 1985), and Thorpe et al., “The Preparation And Cytotoxic Properties Of Antibody-Toxin Conjugates”, Immunol. Rev. 62:119-58 (1982).

[0275] Alternatively, an antibody can be conjugated to a second antibody to form an antibody heteroconjugate as described by Segal in U.S. Pat. No. 4,676,980, which is incorporated herein by reference in its entirety.

[0276] An antibody, with or without a therapeutic moiety conjugated to it, administered alone or in combination with cytotoxic factor(s) and/or cytokine(s) can be used as a therapeutic.

[0277] Immunophenotyping

[0278] The antibodies of the invention may be utilized for immunophenotyping of cell lines and biological samples. Translation products of the gene of the present invention may be useful as cell-specific markers, or more specifically as cellular markers that are differentially expressed at various stages of differentiation and/or maturation of particular cell types. Monoclonal antibodies directed against a specific epitope, or combination of epitopes, will allow for the screening of cellular populations expressing the marker. Various techniques can be utilized using monoclonal antibodies to screen for cellular populations expressing the marker(s), and include magnetic separation using antibody-coated magnetic beads, “panning” with antibody attached to a solid matrix (i.e., plate), and flow cytometry (See, e.g., U.S. Pat. No. 5,985,660; and Morrison et al., Cell, 96:737-49 (1999)).

[0279] These techniques allow for the screening of particular populations of cells, such as might be found with hematological malignancies (i.e. minimal residual disease (MRD) in acute leukemic patients) and “non-self” cells in transplantations to prevent Graft-versus-Host Disease (GVHD). Alternatively, these techniques allow for the screening of hematopoietic stem and progenitor cells capable of undergoing proliferation and/or differentiation, as might be found in human umbilical cord blood.

[0280] Assays For Antibody Binding

[0281] The antibodies of the invention may be assayed for immunospecific binding by any method known in the art. The immunoassays which can be used include but are not limited to competitive and non-competitive assay systems using techniques such as western blots, radioimmunoassays, ELISA (enzyme linked immunosorbent assay), “sandwich” immunoassays, immunoprecipitation assays, precipitin, reactions, gel diffusion precipitin reactions, immunodiffusion assays, agglutination assays, complement-fixation assays, immunoradiometric assays, fluorescent immunoassays, and protein A immunoassays, to name but a few. Such assays are routine and well known in the art (see, e.g., Ausubel et al, eds, 1994, Current Protocols in Molecular Biology, Vol. 1, John Wiley & Sons, Inc., New York, which is incorporated by reference herein in its entirety). Exemplary immunoassays are described briefly below (but are not intended by way of limitation).

[0282] Immunoprecipitation protocols generally comprise lysing a population of cells in a lysis buffer such as RIPA buffer (1% NP-40 or Triton X-100, 1% sodium deoxycholate, 0.1% SDS, 0.15 M NaCl, 0.01 M sodium phosphate at pH 7.2, 1% Trasylol) supplemented with protein phosphatase and/or protease inhibitors (e.g., EDTA, PMSF, aprotinin, sodium vanadate), adding the antibody of interest to the cell lysate, incubating for a period of time (e.g., 1-4 hours) at 4° C., adding protein A and/or protein G sepharose beads to the cell lysate, incubating for about an hour or more at 4° C., washing the beads in lysis buffer and resuspending the beads in SDS/sample buffer. The ability of the antibody of interest to immunoprecipitate a particular antigen can be assessed by, e.g., western blot analysis. One of skill in the art would be knowledgeable as to the parameters that can be modified to increase the binding of the antibody to an antigen and decrease the background (e.g., pre-clearing the cell lysate with sepharose beads). For further discussion regarding immunoprecipitation protocols see, e.g., Ausubel et al., eds., (1994), Current Protocols in Molecular Biology, Vol. 1, John Wiley & Sons, Inc., New York, section 10.16.1.

[0283] Western blot analysis generally comprises preparing protein samples, electrophoresis of the protein samples in a polyacrylamide gel (e.g., 8%-20% SDS-PAGE depending on the molecular weight of the antigen), transferring the protein sample from the polyacrylamide gel to a membrane such as nitrocellulose, PVDF or nylon, blocking the membrane in blocking solution (e.g., PBS with 3% BSA or non-fat milk), washing the membrane in washing buffer (e.g., PBS-Tween 20), blocking the membrane with primary antibody (the antibody of interest) diluted in blocking buffer, washing the membrane in washing buffer, blocking the membrane with a secondary antibody (which recognizes the primary antibody, e.g., an anti-human antibody) conjugated to an enzymatic substrate (e.g., horseradish peroxidase or alkaline phosphatase) or radioactive molecule (e.g., 32P or 125I) diluted in blocking buffer, washing the membrane in wash buffer, and detecting the presence of the antigen. One of skill in the art would be knowledgeable as to the parameters that can be modified to increase the signal detected and to reduce the background noise. For further discussion regarding western blot protocols see, e.g., Ausubel et al, eds, (1994), Current Protocols in Molecular Biology, Vol. 1, John Wiley & Sons, Inc., New York, section 10.8.1.

[0284] ELISAs comprise preparing antigen, coating the well of a 96 well microtiter plate with the antigen, adding the antibody of interest conjugated to a detectable compound such as an enzymatic substrate (e.g., horseradish peroxidase or alkaline phosphatase) to the well and incubating for a period of time, and detecting the presence of the antigen. In ELISAs the antibody of interest does not have to be conjugated to a detectable compound; instead, a second antibody (which recognizes the antibody of interest) conjugated to a detectable compound may be added to the well. Further, instead of coating the well with the antigen, the antibody may be coated to the well. In this case, a second antibody conjugated to a detectable compound may be added following the addition of the antigen of interest to the coated well. One of skill in the art would be knowledgeable as to the parameters that can be modified to increase the signal detected as well as other variations of ELISAs known in the art. For further discussion regarding ELISAs see, e.g., Ausubel et al, eds, (1994), Current Protocols in Molecular Biology, Vol. 1, John Wiley & Sons, Inc., New York, section 11.2.1.

[0285] The binding affinity of an antibody to an antigen and the off-rate of an antibody-antigen interaction can be determined by competitive binding assays. One example of a competitive binding assay is a radioimmunoassay comprising the incubation of labeled antigen (e.g., 3H or 125I) with the antibody of interest in the presence of increasing amounts of unlabeled antigen, and the detection of the antibody bound to the labeled antigen. The affinity of the antibody of interest for a particular antigen and the binding off-rates can be determined from the data by scatchard plot analysis. Competition with a second antibody can also be determined using radioimmunoassays. In this case, the antigen is incubated with antibody of interest conjugated to a labeled compound (e.g., 3H or 125I) in the presence of increasing amounts of an unlabeled second antibody.

[0286] Antibodies of the invention may be characterized using immunocytochemisty methods on cells (e.g., mammalian cells, such as CHO cells) transfected with a vector enabling the expression of an antigen or with vector alone using techniques commonly known in the art. Antibodies that bind antigen transfected cells, but not vector-only transfected cells, are antigen specific.

[0287] Therapeutic Uses

[0288] The present invention is further directed to antibody-based therapies which involve administering antibodies of the invention to an animal, preferably a mammal, and most preferably a human, patient for treating one or more of the disclosed diseases, disorders, or conditions. Therapeutic compounds of the invention include, but are not limited to, antibodies of the invention (including fragments, analogs and derivatives thereof as described herein) and nucleic acids encoding antibodies of the invention (including fragments, analogs and derivatives thereof and anti-idiotypic antibodies as described herein). The antibodies of the invention can be used to treat, inhibit or prevent diseases, disorders or conditions associated with aberrant expression and/or activity of a polypeptide of the invention, including, but not limited to, any one or more of the diseases, disorders, or conditions described herein. The treatment and/or prevention of diseases, disorders, or conditions associated with aberrant expression and/or activity of a polypeptide of the invention includes, but is not limited to, alleviating symptoms associated with those diseases, disorders or conditions. Antibodies of the invention may be provided in pharmaceutically acceptable compositions as known in the art or as described herein.

[0289] In a specific and preferred embodiment, the present invention is directed to antibody-based therapies which involve administering antibodies of the invention to an animal, preferably a mammal, and most preferably a human, patient for treating one or more diseases, disorders, or conditions, including but not limited to: neural disorders, immune system disorders, muscular disorders, reproductive disorders, gastrointestinal disorders, pulmonary disorders, cardiovascular disorders, renal disorders, proliferative disorders, and/or cancerous diseases and conditions., and/or as described elsewhere herein. Therapeutic compounds of the invention include, but are not limited to, antibodies of the invention (e.g., antibodies directed to the full length protein expressed on the cell surface of a mammalian cell; antibodies directed to an epitope of a polypeptide of the invention (such as, for example, a predicted linear epitope shown in column 7 of Table 1A; or a conformational epitope, including fragments, analogs and derivatives thereof as described herein) and nucleic acids encoding antibodies of the invention (including fragments, analogs and derivatives thereof and anti-idiotypic antibodies as described herein). The antibodies of the invention can be used to treat, inhibit or prevent diseases, disorders or conditions associated with aberrant expression and/or activity of a polypeptide of the invention, including, but not limited to, any one or more of the diseases, disorders, or conditions described herein. The treatment and/or prevention of diseases, disorders, or conditions associated with aberrant expression and/or activity of a polypeptide of the invention includes, but is not limited to, alleviating symptoms associated with those diseases, disorders or conditions. Antibodies of the invention may be provided in pharmaceutically acceptable compositions as known in the art or as described herein.

[0290] A summary of the ways in which the antibodies of the present invention may be used therapeutically includes binding polynucleotides or polypeptides of the present invention locally or systemically in the body or by direct cytotoxicity of the antibody, e.g. as mediated by complement (CDC) or by effector cells (ADCC). Some of these approaches are described in more detail below. Armed with the teachings provided herein, one of ordinary skill in the art will know how to use the antibodies of the present invention for diagnostic, monitoring or therapeutic purposes without undue experimentation.

[0291] The antibodies of this invention may be advantageously utilized in combination with other monoclonal or chimeric antibodies, or with lymphokines or hematopoietic growth factors (such as, e.g., IL-2, IL-3 and IL-7), for example, which serve to increase the number or activity of effector cells which interact with the antibodies.

[0292] The antibodies of the invention may be administered alone or in combination with other types of treatments (e.g., radiation therapy, chemotherapy, hormonal therapy, immunotherapy and anti-tumor agents). Generally, administration of products of a species origin or species reactivity (in the case of antibodies) that is the same species as that of the patient is preferred. Thus, in a preferred embodiment, human antibodies, fragments derivatives, analogs, or nucleic acids, are administered to a human patient for therapy or prophylaxis.

[0293] It is preferred to use high affinity and/or potent in vivo inhibiting and/or neutralizing antibodies against polypeptides or polynucleotides of the present invention, fragments or regions thereof, for both immunoassays directed to and therapy of disorders related to polynucleotides or polypeptides, including fragments thereof, of the present invention. Such antibodies, fragments, or regions, will preferably have an affinity for polynucleotides or polypeptides of the invention, including fragments thereof. Preferred binding affinities include those with a dissociation constant or Kd less than 5×10⁻² M, 10⁻² M, 5×10⁻³ M, 10⁻³ M, 5×10⁴ M, 10⁻⁴ M, 5×10⁻⁵ M, 10⁻⁵ M, 5×10⁻⁶ M, 10⁻⁶ M, 5×10⁻⁷ M, 10⁻⁷ M, 5×10⁻⁸ M, 10⁻⁸ M, 5×10−9 M, 10⁻⁹ M, 5×10⁻¹⁰ M, 10⁻¹⁰ M, 5×10⁻¹¹ M, 10⁻¹¹ M, 5×10⁻¹² M, 10⁻¹² M, 5×10¹³ M, 10⁻¹³ M, 5×10⁻¹⁴ M, 10¹⁴ M, 5×10⁻¹⁵ M, and 10⁻¹⁵ M.

[0294] Gene Therapy

[0295] In a specific embodiment, nucleic acids comprising sequences encoding antibodies or functional derivatives thereof, are administered to treat, inhibit or prevent a disease or disorder associated with aberrant expression and/or activity of a polypeptide of the invention, by way of gene therapy. Gene therapy refers to therapy performed by the administration to a subject of an expressed or expressible nucleic acid. In this embodiment of the invention, the nucleic acids produce their encoded protein that mediates a therapeutic effect.

[0296] Any of the methods for gene therapy available in the art can be used according to the present invention. Exemplary methods are described below.

[0297] For general reviews of the methods of gene therapy, see Goldspiel et al., Clinical Pharmacy 12:488-505 (1993); Wu and Wu, Biotherapy 3:87-95 (1991); Tolstoshev, Ann. Rev. Pharmacol. Toxicol. 32:573-596 (1993); Mulligan, Science 260:926-932 (1993); and Morgan and Anderson, Ann. Rev. Biochem. 62:191-217 (1993); May, TIBTECH 11(5):155-215 (1993). Methods commonly known in the art of recombinant DNA technology which can be used are described in Ausubel et al. (eds.), Current Protocols in Molecular Biology, John Wiley & Sons, NY (1993); and Kriegler, Gene Transfer and Expression, A Laboratory Manual, Stockton Press, NY (1990).

[0298] In a preferred embodiment, the compound comprises nucleic acid sequences-encoding an antibody, said nucleic acid sequences being part of expression vectors that express the antibody or fragments or climeric proteins or heavy or light chains thereof in a suitable host. In particular, such nucleic acid sequences have promoters operably linked to the antibody coding region, said promoter being inducible or constitutive, and, optionally, tissue-specific. In another particular embodiment, nucleic acid molecules are used in which the antibody coding sequences and any other desired sequences are flanked by regions that promote homologous recombination at a desired site in the genome, thus providing for intrachromosomal expression of the antibody encoding nucleic acids (Koller and Smithies, Proc. Natl. Acad. Sci. USA 86:8932-8935 (1989); Zijlstra et al., Nature 342:435-438 (1989) In specific embodiments, the expressed antibody molecule is a single chain antibody; alternatively, the nucleic acid sequences include sequences encoding both the heavy and light chains, or fragments thereof, of the antibody.

[0299] Delivery of the nucleic acids into a patient may be either direct, in which case the patient is directly exposed to the nucleic acid or nucleic acid-carrying vectors, or indirect, in which case, cells are first transformed with the nucleic acids in vitro, then transplanted into the patient. These two approaches are known, respectively, as in vivo or ex vivo gene therapy.

[0300] In a specific embodiment, the nucleic acid sequences are directly administered in vivo, where it is expressed to produce the encoded product. This can be accomplished by any of numerous methods known in the art, e.g., by constructing them as part of an appropriate nucleic acid expression vector and administering it so that they become intracellular, e.g., by infection using defective or attenuated retrovirals or other viral vectors (see U.S. Pat. No. 4,980,286), or by direct injection of naked DNA, or by use of microparticle bombardment (e.g., a gene gun; Biolistic, Dupont), or coating with lipids or cell-surface receptors or transfecting agents, encapsulation in liposomes, microparticles, or microcapsules, or by administering them in linkage to a peptide which is known to enter the nucleus, by administering it in linkage to a ligand subject to receptor-mediated endocytosis (see, e.g., Wu and Wu, J. Biol. Chem. 262:4429-4432 (1987)) (which can be used to target cell types specifically expressing the receptors), etc. In another embodiment, nucleic acid-ligand complexes can be formed in which the ligand comprises a fusogenic viral peptide to disrupt endosomes, allowing the nucleic acid to avoid lysosomal degradation. In yet another embodiment, the nucleic acid can be targeted in vivo for cell specific uptake and expression, by targeting a specific receptor (see, e.g., PCT Publications WO 92/06180; WO 92/22635; WO92/20316; WO93/14188, WO 93/20221). Alternatively, the nucleic acid can be introduced intracellularly and incorporated within host cell DNA for expression, by homologous recombination (Koller and Smithies, Proc. Natl. Acad. Sci. USA 86:8932-8935 (1989); Zijlstra et al., Nature 342:435-438 (1989)).

[0301] In a specific embodiment, viral vectors that contains nucleic acid sequences encoding an antibody of the invention are used. For example, a retroviral vector can be used (see Miller et al., Meth. Enzymol. 217:581-599 (1993)). These retroviral vectors contain the components necessary for the correct packaging of the viral genome and integration into the host cell DNA. The nucleic acid sequences encoding the antibody to be used in gene therapy are cloned into one or more vectors, which facilitates delivery of the gene into a patient. More detail about retroviral vectors can be found in Boesen et al., Biotherapy 6:291-302 (1994), which describes the use of a retroviral vector to deliver the mdrl gene to hematopoietic stem cells in order to make the stem cells more resistant to chemotherapy. Other references illustrating the use of retroviral vectors in gene therapy are: Clowes et al., J. Clin. Invest. 93:644-651 (1994); Kiem et al., Blood 83:1467-1473 (1994); Salmons and Gunzberg, Human Gene Therapy 4:129-141 (1993); and Grossman and Wilson, Curr. Opin. in Genetics and Devel. 3:110-114 (1993).

[0302] Adenoviruses are other viral vectors that can be used in gene therapy. Adenoviruses are especially attractive vehicles for delivering genes to respiratory epithelia. Adenoviruses naturally infect respiratory epithelia where they cause a mild disease. Other targets for adenovirus-based delivery systems are liver, the central nervous system, endothelial cells, and muscle. Adenoviruses have the advantage of being capable of infecting non-dividing cells. Kozarsky and Wilson, Current Opinion in Genetics and Development 3:499-503 (1993) present a review of adenovirus-based gene therapy. Bout et al., Human Gene Therapy 5:3-10 (1994) demonstrated the use of adenovirus vectors to transfer genes to the respiratory epithelia of rhesus monkeys. Other instances of the use of adenoviruses in gene therapy can be found in Rosenfeld et al., Science 252:431-434 (1991); Rosenfeld et al., Cell 68:143-155 (1992); Mastrangeli et al., J. Clin. Invest. 91:225-234 (1993); PCT Publication WO94/12649; and Wang, et al., Gene Therapy 2:775-783 (1995). In a preferred embodiment, adenovirus vectors are used.

[0303] Adeno-associated virus (AAV) has also been proposed for use in gene therapy (Walsh et al., Proc. Soc. Exp. Biol. Med. 204:289-300 (1993); U.S. Pat. No. 5,436,146).

[0304] Another approach to gene therapy involves transferring a gene to cells in tissue culture by such methods as electroporation, lipofection, calcium phosphate mediated transfection, or viral infection. Usually, the method of transfer includes the transfer of a selectable marker to the cells. The cells are then placed under selection to isolate those cells that have taken up and are expressing the transferred gene. Those cells are then delivered to a patient.

[0305] In this embodiment, the nucleic acid is introduced into a cell prior to administration in vivo of the resulting recombinant cell. Such introduction can be carried out by any method known in the art, including but not limited to transfection, electroporation, microinjection, infection with a viral or bacteriophage vector containing the nucleic acid sequences, cell fusion, chromosome-mediated gene transfer, microcell-mediated gene transfer, spheroplast fusion, etc. Numerous techniques are known in the art for the introduction of foreign genes into cells (see, e.g., Loeffler and Behr, Meth. Enzymol. 217:599-618 (1993); Cohen et al., Meth. Enzymol. 217:618-644 (1993); Cline, Pharmac. Ther. 29:69-92m (1985) and may be used in accordance with the present invention, provided that the necessary developmental and physiological functions of the recipient cells are not disrupted. The technique should provide for the stable transfer of the nucleic acid to the cell, so that the nucleic acid is expressible by the cell and preferably heritable and expressible by its cell progeny.

[0306] The resulting recombinant cells can be delivered to a patient by various methods known in the art. Recombinant blood cells (e.g., hematopoietic stem or progenitor cells) are preferably administered intravenously. The amount of cells envisioned for use depends on the desired effect, patient state, etc., and can be determined by one skilled in the art.

[0307] Cells into which a nucleic acid can be introduced for purposes of gene therapy encompass any desired, available cell type, and include but are not limited to epithelial cells, endothelial cells, keratinocytes, fibroblasts, muscle cells, hepatocytes; blood cells such as T lymphocytes, B lymphocytes, monocytes, macrophages, neutrophils, eosinophils, megakaryocytes, granulocytes; various stem or progenitor cells, in particular hematopoietic stem or progenitor cells, e.g., as obtained from bone marrow, umbilical cord blood, peripheral blood, fetal liver, etc.

[0308] In a preferred embodiment, the cell used for gene therapy is autologous to the patient.

[0309] In an embodiment in which recombinant cells are used in gene therapy, nucleic acid sequences encoding an antibody are introduced into the cells such that they are expressible by the cells or their progeny, and the recombinant cells are then administered in vivo for therapeutic effect. In a specific embodiment, stem or progenitor cells are used. Any stem and/or progenitor cells which can be isolated and maintained in vitro can potentially be used in accordance with this embodiment of the present invention (see e.g. PCT Publication WO 94/08598; Stemple and Anderson, Cell 71:973-985 (1992); Rheinwald, Meth. Cell Bio. 21A:229 (1980); and Pittelkow and Scott, Mayo Clinic Proc. 61:771 (1986)).

[0310] In a specific embodiment, the nucleic acid to be introduced for purposes of gene therapy comprises an inducible promoter operably linked to the coding region, such that expression of the nucleic acid is controllable by the presence or absence of an appropriate inducer of transcription.

[0311] Demonstration of Therapeutic or Prophylactic Activity

[0312] The compounds or pharmaceutical compositions of the invention are preferably tested in vitro, and then in vivo for the desired therapeutic or prophylactic activity, prior to use in humans. For example, in vitro assays to demonstrate the therapeutic or prophylactic utility of a compound or pharmaceutical composition include, the effect of a compound on a cell line or a patient tissue sample. The effect of the compound or composition on the cell line and/or tissue sample can be determined utilizing techniques known to those of skill in the art including, but not limited to, rosette formation assays and cell lysis assays. In accordance with the invention, in vitro assays which can be used to determine whether administration of a specific compound is indicated, include in vitro cell culture assays in which a patient tissue sample is grown in culture, and exposed to or otherwise administered a compound, and the effect of such compound upon the tissue sample is observed.

[0313] Therapeutic/Prophylactic Administration and Composition

[0314] The invention provides methods of treatment, inhibition and prophylaxis by administration to a subject of an effective amount of a compound or pharmaceutical composition of the invention, preferably a polypeptide or antibody of the invention. In a preferred embodiment, the compound is substantially purified (e.g., substantially free from substances that limit its effect or produce undesired side-effects). The subject is preferably an animal, including but not limited to animals such as cows, pigs, horses, chickens, cats, dogs, etc., and is preferably a mammal, and most preferably human.

[0315] Formulations and methods of administration that can be employed when the compound comprises a nucleic acid or an immunoglobulin are described above; additional appropriate formulations and routes of administration can be selected from among those described herein below.

[0316] Various delivery systems are known and can be used to administer a compound of the invention, e.g., encapsulation in liposomes, microparticles, microcapsules, recombinant cells capable of expressing the compound, receptor-mediated endocytosis (see, e.g., Wu and Wu, J. Biol. Chem. 262:4429-4432 (1987)), construction of a nucleic acid as part of a retroviral or other vector, etc. Methods of introduction include but are not limited to intradermal, intramuscular, intraperitoneal, intravenous, subcutaneous, intranasal, epidural, and oral routes. The compounds or compositions may be administered by any convenient route, for example by infusion or bolus injection, by absorption through epithelial or mucocutaneous linings (e.g., oral mucosa, rectal and intestinal mucosa, etc.) and may be administered together with other biologically active agents. Administration can be systemic or local. In addition, it may be desirable to introduce the pharmaceutical compounds or compositions of the invention into the central nervous system by any suitable routes including intraventricular and intrathecal injection; intraventricular injection may be facilitated by an intraventricular catheter, for example, attached to a reservoir, such as an Ommaya reservoir. Pulmonary administration can also be employed, e.g., by use of an inhaler or nebulizer, and formulation with an aerosolizing agent.

[0317] In a specific embodiment, it may be desirable to administer the pharmaceutical compounds or compositions of the invention locally to the area in need of treatment; this may be achieved by, for example, and not by way of limitation, local infusion during surgery, topical application, e.g., in conjunction with a wound dressing after surgery, by injection, by means of a catheter, by means of a suppository, or by means of an implant, said implant being of a porous, non-porous, or gelatinous material, including membranes, such as sialastic membranes, or fibers. Preferably, when administering a protein, including an antibody, of the invention, care must be taken to use materials to which the protein does not absorb.

[0318] In another embodiment, the compound or composition can be delivered in a vesicle, in particular a liposome (see Langer, Science 249:1527-1533 (1990); Treat et al., in Liposomes in the Therapy of Infectious Disease and Cancer, Lopez-Berestein and Fidler (eds.), Liss, New York, pp. 353-365 (1989); Lopez-Berestein, ibid., pp. 317-327; see generally ibid.)

[0319] In yet another embodiment, the compound or composition can be delivered in a controlled release system. In one embodiment, a pump may be used (see Langer, supra; Sefton, CRC Crit. Ref. Biomed. Eng. 14:201 (1987); Buchwald et al., Surgery 88:507 (1980); Saudek et al., N. Engl. J. Med. 321:574 (1989)). In another embodiment, polymeric materials can be used (see Medical Applications of Controlled Release, Langer and Wise (eds.), CRC Pres., Boca Raton, Fla. (1974); Controlled Drug Bioavailability, Drug Product Design and Performance, Smolen and Ball (eds.), Wiley, New York (1984); Ranger and Peppas, J., Macromol. Sci. Rev. Macromol. Chem. 23:61 (1983); see also Levy et al., Science 228:190 (1985); During et al., Ann. Neurol. 25:351 (1989); Howard et al., J.Neurosurg. 71:105 (1989)). In yet another embodiment, a controlled release system can be placed in proximity of the therapeutic target, e.g., the brain, thus requiring only a fraction of the systemic dose (see, e.g., Goodson, in Medical Applications of Controlled Release, supra, vol. 2, pp. 115-138 (1984)).

[0320] Other controlled release systems are discussed in the review by Langer (Science 249:1527-1533 (1990)).

[0321] In a specific embodiment where the compound of the invention is a nucleic acid encoding a protein, the nucleic acid can be administered in vivo to promote expression of its encoded protein, by constructing it as part of an appropriate nucleic acid expression vector and administering it so that it becomes intracellular, e.g., by use of a retroviral vector (see U.S. Pat. No. 4,980,286), or by direct injection, or by use of microparticle bombardment (e.g., a gene gun; Biolistic, Dupont), or coating with lipids or cell-surface receptors or transfecting agents, or by administering it in linkage to a homeobox-like peptide which is known to enter the nucleus (see e.g., Joliot et al., Proc. Natl. Acad. Sci. USA 88:1864-1868 (1991)), etc. Alternatively, a nucleic acid can be introduced intracellularly and incorporated within host cell DNA for expression, by homologous recombination.

[0322] The present invention also provides pharmaceutical compositions. Such compositions comprise a therapeutically effective amount of a compound, and a pharmaceutically acceptable carrier. In a specific embodiment, the term “pharmaceutically acceptable” means approved by a regulatory agency of the Federal or a state government or listed in the U.S. Pharmacopeia or other generally recognized pharmacopeia for use in animals, and more particularly in humans. The term “carrier” refers to a diluent, adjuvant, excipient, or vehicle with which the therapeutic is administered. Such pharmaceutical carriers can be sterile liquids, such as water and oils, including those of petroleum, animal, vegetable or synthetic origin, such as peanut oil, soybean oil, mineral oil, sesame oil and the like. Water is a preferred carrier when the pharmaceutical composition is administered intravenously. Saline solutions and aqueous dextrose and glycerol solutions can also be employed as liquid carriers, particularly for injectable solutions. Suitable pharmaceutical excipients include starch, glucose, lactose, sucrose, gelatin, malt, rice, flour, chalk, silica gel, sodium stearate, glycerol monostearate, talc, sodium chloride, dried skim milk, glycerol, propylene, glycol, water, ethanol and the like. The composition, if desired, can also contain minor amounts of wetting or emulsifying agents, or pH buffering agents. These compositions can take the form of solutions, suspensions, emulsion, tablets, pills, capsules, powders, sustained-release formulations and the like. The composition can be formulated as a suppository, with traditional binders and carriers such as triglycerides. Oral formulation can include standard carriers such as pharmaceutical grades of mannitol, lactose, starch, magnesium stearate, sodium saccharine, cellulose, magnesium carbonate, etc. Examples of suitable pharmaceutical carriers are described in “Remington's Pharmaceutical Sciences” by E. W. Martin. Such compositions will contain a therapeutically effective amount of the compound, preferably in purified form, together with a suitable amount of carrier so as to provide the form for proper administration to the patient. The formulation should suit the mode of administration.

[0323] In a preferred embodiment, the composition is formulated in accordance with routine procedures as a pharmaceutical composition adapted for intravenous administration to human beings. Typically, compositions for intravenous administration are solutions in sterile isotonic aqueous buffer. Where necessary, the composition may also include a solubilizing agent and a local anesthetic such as lignocaine to ease pain at the site of the injection. Generally, the ingredients are supplied either separately or mixed together in unit dosag& form, for example, as a dry lyophilized powder or water free concentrate in a hermetically sealed container such as an ampoule or sachette indicating the quantity of active agent. Where the composition is to be administered by infusion, it can be dispensed with an infusion bottle containing sterile pharmaceutical grade water or saline. Where the composition is administered by injection, an ampoule of sterile water for injection or saline can be provided so that the ingredients may be mixed prior to administration.

[0324] The compounds of the invention can be formulated as neutral or salt forms. Pharmaceutically acceptable salts include those formed with anions such as those derived from hydrochloric, phosphoric, acetic, oxalic, tartaric acids, etc., and those formed with cations such as those derived from sodium, potassium, ammonium, calcium, ferric hydroxides, isopropylamine, triethylamine, 2-ethylamino ethanol, histidine, procaine, etc.

[0325] The amount of the compound of the invention which will be effective in the treatment, inhibition and prevention of a disease or disorder associated with aberrant expression and/or activity of a polypeptide of the invention can be determined by standard clinical techniques. In addition, in vitro assays may optionally be employed to help identify optimal dosage ranges. The precise dose to be employed in the formulation will also depend on the route of administration, and the seriousness of the disease or disorder, and should be decided according to the judgment of the practitioner and each patient's circumstances. Effective doses may be extrapolated from dose-response curves derived from in vitro or animal model test systems.

[0326] For antibodies, the dosage administered to a patient is typically 0.1 mg/kg to 100 mg/kg of the patient's body weight. Preferably, the dosage administered to a patient is between 0.1 mg/kg and 20 mg/kg of the patient's body weight, more preferably 1 mg/kg to 10 mg/kg of the patient's body weight. Generally, human antibodies have a longer half-life within the human body than antibodies from other species due to the immune response to the foreign polypeptides. Thus, lower dosages of human antibodies and less frequent administration is often possible. Further, the dosage and frequency of administration of antibodies of the invention may be reduced by enhancing uptake and tissue penetration (e.g., into the brain) of the antibodies by modifications such as, for example, lipidation.

[0327] The invention also provides a pharmaceutical pack or kit comprising one or more containers filled with one or more of the ingredients of the pharmaceutical compositions of the invention. Optionally associated with such container(s) can be a notice in the form prescribed by a governmental agency regulating the manufacture, use or sale of pharmaceuticals or biological products, which notice reflects approval by the agency of manufacture, use or sale for human administration.

[0328] Diagnosis and Imaging

[0329] Labeled antibodies, and derivatives and analogs thereof, which specifically bind to a polypeptide of interest can be used for diagnostic purposes to detect, diagnose, or monitor diseases, disorders, and/or conditions associated with the aberrant expression and/or activity of a polypeptide of the invention. The invention provides for the detection of aberrant expression of a polypeptide of interest, comprising (a) assaying the expression of the polypeptide of interest in cells or body fluid of an individual using one or more antibodies specific to the polypeptide interest and (b) comparing the level of gene expression with a standard gene expression level, whereby an increase or decrease in the assayed polypeptide gene expression level compared to the standard expression level is indicative of aberrant expression.

[0330] The invention provides a diagnostic assay for diagnosing a disorder, comprising (a) assaying the expression of the polypeptide of interest in cells or body fluid of an individual using one or more antibodies specific to the polypeptide interest and (b) comparing the level of gene expression with a standard gene expression level, whereby an increase or decrease in the assayed polypeptide gene expression level compared to the standard expression level is indicative of a particular disorder. With respect to cancer, the presence of a relatively high amount of transcript in biopsied tissue from an individual may indicate a predisposition for the development of the disease, or may provide a means for detecting the disease prior to the appearance of actual clinical symptoms. A more definitive diagnosis of this type may allow health professionals to employ preventative measures or aggressive treatment earlier thereby preventing the development or further progression of the cancer.

[0331] Antibodies of the invention can be used to assay protein levels in a biological sample using classical immunohistological methods known to those of skill in the art (e.g., see Jalkanen et al., J. Cell. Biol. 101:976-985 (1985); Jalkanen et al., J. Cell. Biol. 105:3087-3096 (1987)). Other antibody-based methods useful for detecting protein gene expression include immunoassays, such as the enzyme linked immunosorbent assay (ELISA) and the radioimmunoassay (RIA). Suitable antibody assay labels are known in the art and include enzyme labels, such as, glucose oxidase; radioisotopes, such as iodine (125I, 121I), carbon (14C), sulfur (35S), tritium (3H), indium (112In), and technetium (99Tc); luminescent labels, such as luminol; and fluorescent labels, such as fluorescein and rhodamine, and biotin.

[0332] One facet of the invention is the detection and diagnosis of a disease or disorder associated with aberrant expression of a polypeptide of interest in an animal, preferably a mammal and most preferably a human. In one embodiment, diagnosis comprises: a) administering (for example, parenterally, subcutaneously, or intraperitoneally) to a subject an effective amount of a labeled molecule which specifically binds to the polypeptide of interest; b) waiting for a time interval following the administering for permitting the labeled molecule to preferentially concentrate at sites in the subject where the polypeptide is expressed (and for unbound labeled molecule to be cleared to background level); c) determining background level; and d) detecting the labeled molecule in the subject, such that detection of labeled molecule above the background level indicates that the subject has a particular disease or disorder associated with aberrant expression of the polypeptide of interest. Background level can be determined by various methods including, comparing the amount of labeled molecule detected to a standard value previously determined for a particular system.

[0333] It will be understood in the art that the size of the subject and the imaging system used will determine the quantity of imaging moiety needed to produce diagnostic images. In the case of a radioisotope moiety, for a human subject, the quantity of radioactivity injected will normally range from about 5 to 20 millicuries of 99mTc. The labeled antibody or antibody fragment will then preferentially accumulate at the location of cells which contain the specific protein. In vivo tumor imaging is described in S.W. Burchiel et al., “Immunopharmacokinetics of Radiolabeled Antibodies and Their Fragments.” (Chapter 13 in Tumor Imaging: The Radiochemical Detection of Cancer, S. W. Burchiel and B. A. Rhodes, eds., Masson Publishing Inc. (1982)).

[0334] Depending on several variables, including the type of label used and the mode of administration, the time interval following the administration for permitting the labeled molecule to preferentially concentrate at sites in the subject and for unbound labeled molecule to be cleared to background level is 6 to 48 hours or 6 to 24 hours or 6 to 12 hours. In another embodiment the time interval following administration is 5 to 20 days or 5 to 10 days.

[0335] In an embodiment, monitoring of the disease or disorder is carried out by repeating the method for diagnosing the disease or disease, for example, one month after initial diagnosis, six months after initial diagnosis, one year after initial diagnosis, etc.

[0336] Presence of the labeled molecule can be detected in the patient using methods known in the art for in vivo scanning. These methods depend upon the type of label used. Skilled artisans will be able to determine the appropriate method for detecting a particular label. Methods and devices that may be used in the diagnostic methods of the invention include, but are not limited to, computed tomography (CT), whole body scan such as position emission tomography (PET), magnetic resonance imaging (MRI), and sonography.

[0337] In a specific embodiment, the molecule is labeled with a radioisotope and is detected in the patient using a radiation responsive surgical instrument (Thurston et al., U.S. Pat. No. 5,441,050). In another embodiment, the molecule is labeled with a fluorescent compound and is detected in the patient using a fluorescence responsive scanning instrument. In another embodiment, the molecule is labeled with a positron emitting metal and is detected in the patent using positron emission-tomography. In yet another embodiment, the molecule is labeled with a paramagnetic label and is detected in a patient using magnetic resonance imaging (MRI).

[0338] Kits

[0339] The present invention provides kits that can be used in the above methods. In one embodiment, a kit comprises an antibody of the invention, preferably a purified antibody, in one or more containers. In a specific embodiment, the kits of the present invention contain a substantially isolated polypeptide comprising an epitope which is specifically immunoreactive with an antibody included in the kit. Preferably, the kits of the present invention further comprise a control antibody which does not react with the polypeptide of interest. In another specific embodiment, the kits of the present invention contain a means for detecting the binding of an antibody to a polypeptide of interest (e.g., the antibody may be conjugated to a detectable substrate such as a fluorescent compound, an enzymatic substrate, a radioactive compound or a luminescent compound, or a second antibody which recognizes the first antibody may be conjugated to a detectable substrate).

[0340] In another specific embodiment of the present invention, the kit is a diagnostic kit for use in screening serum containing antibodies specific against proliferative and/or cancerous polynucleotides and polypeptides. Such a kit may include a control antibody that does not react with the polypeptide of interest. Such a kit may include a substantially isolated polypeptide antigen comprising an epitope which is specifically immunoreactive with at least one anti-polypeptide antigen antibody. Further, such a kit includes means for detecting the binding of said antibody to the antigen (e.g., the antibody may be conjugated to a fluorescent compound such as fluorescein or rhodamine which can be detected by flow cytometry). In specific embodiments, the kit may include a recombinantly produced or chemically synthesized polypeptide antigen. The polypeptide antigen of the kit may also be attached to a solid support.

[0341] In a more specific embodiment the detecting means of the above-described kit includes a solid support to which said polypeptide antigen is attached. Such a kit may also include a non-attached reporter-labeled anti-human antibody. In this embodiment, binding of the antibody to the polypeptide antigen can be detected by binding of the said reporter-labeled antibody.

[0342] In an additional embodiment, the invention includes a diagnostic kit for use in screening serum containing antigens of the polypeptide of the invention. The diagnostic kit includes a substantially isolated antibody specifically immunoreactive with polypeptide or polynucleotide antigens, and means for detecting the binding of the polynucleotide or polypeptide antigen to the antibody. In one embodiment, the antibody is attached to a solid support. In a specific embodiment, the antibody may be a monoclonal antibody. The detecting means of the kit may include a second, labeled monoclonal antibody. Alternatively, or in addition, the detecting means may include a labeled, competing antigen.

[0343] In one diagnostic configuration, test serum is reacted with a solid phase reagent having a surface-bound antigen obtained by the methods of the present invention. After binding with specific antigen antibody to the reagent and removing unbound serum components by washing, the reagent is reacted with reporter-labeled anti-human antibody to bind reporter to the reagent in proportion to the amount of bound anti-antigen antibody on the solid support. The reagent is again washed to remove unbound labeled antibody, and the amount of reporter associated with the reagent is determined. Typically, the reporter is an enzyme which is detected by incubating the solid phase in the presence of a suitable fluorometric, luminescent or calorimetric substrate (Sigma, St. Louis, Mo.).

[0344] The solid surface reagent in the above assay is prepared by known techniques for attaching protein material to solid support material, such as polymeric beads, dip sticks, 96-well plate or filter material. These attachment methods generally include non-specific adsorption of the protein to the support or covalent attachment of the protein, typically through a free amine group, to a chemically reactive group on the solid support, such as an activated carboxyl, hydroxyl, or aldehyde group. Alternatively, streptavidin coated plates can be used in conjunction with biotinylated antigen(s).

[0345] Thus, the invention provides an assay system or kit for carrying out this diagnostic method. The kit generally includes a support with surface-bound recombinant antigens, and a reporter-labeled anti-human antibody for detecting surface-bound anti-antigen antibody.

[0346] Uses of the Polynucleotides

[0347] Each of the polynucleotides identified herein can be used in numerous ways as reagents. The following description should be considered exemplary and utilizes known techniques.

[0348] The polynucleotides of the present invention are useful for chromosome identification. There exists an ongoing need to identify new chromosome markers, since few chromosome marking reagents, based on actual sequence data (repeat polymorphisms), are presently available. Each sequence is specifically targeted to and can hybridize with a particular location on an individual human chromosome, thus each polynucleotide of the present invention can routinely be used as a chromosome marker using techniques known in the art. Table 1A, column 9 provides the chromosome location of some of the polynucleotides of the invention.

[0349] Briefly, sequences can be mapped to chromosomes by preparing PCR primers (preferably at least 15 bp (e.g., 15-25 bp) from the sequences shown in SEQ ID NO:X. Primers can optionally be selected using computer analysis so that primers do not span more than one predicted exon in the genomic DNA. These primers are then used for PCR screening of somatic cell hybrids containing individual human chromosomes. Only those hybrids containing the human gene corresponding to SEQ ID NO:X will yield an amplified fragment.

[0350] Similarly, somatic hybrids provide a rapid method of PCR mapping the polynucleotides to particular chromosomes. Three or more clones can be assigned per day using a single thermal cycler. Moreover, sublocalization of the polynucleotides can be achieved with panels of specific chromosome fragments. Other gene mapping strategies that can be used include in situ hybridization, prescreening with labeled flow-sorted chromosomes, preselection by hybridization to construct chromosome specific-cDNA libraries, and computer mapping techniques (See, e.g., Shuler, Trends Biotechnol 16:456-459 (1998) which is hereby incorporated by reference in its entirety).

[0351] Precise chromosomal location of the polynucleotides can also be achieved using fluorescence in situ hybridization (FISH) of a metaphase chromosomal spread. This technique uses polynucleotides as short as 500 or 600 bases; however, polynucleotides 2,000-4,000 bp are preferred. For a review of this technique, see Verma et al., “Human Chromosomes: a Manual of Basic Techniques,” Pergamon Press, New York (1988).

[0352] For chromosome mapping, the polynucleotides can be used individually (to mark a single chromosome or a single site on that chromosome) or in panels (for marking multiple sites and/or multiple chromosomes).

[0353] Thus, the present invention also provides a method for chromosomal localization which involves (a) preparing PCR primers from the polynucleotide sequences in Table 1A and/or Table 2 and SEQ ID NO:X and (b) screening somatic cell hybrids containing individual chromosomes.

[0354] The polynucleotides of the present invention would likewise be useful for radiation hybrid mapping, HAPPY mapping, and long range restriction mapping. For a review of these techniques and others known in the art, see, e.g. Dear, “Genome Mapping: A Practical Approach,” IRL Press at Oxford University Press, London (1997); Aydin, J. Mol. Med. 77:691-694 (1999); Hacia et al., Mol. Psychiatry 3:483-492 (1998); Herrick et al., Chromosome Res. 7:409-423 (1999); Hamilton et al., Methods Cell Biol. 62:265-280 (2000); and/or Ott, J. Hered. 90:68-70 (1999) each of which is hereby incorporated by reference in its entirety.

[0355] Once a polynucleotide has been mapped to a precise chromosomal location, the physical position of the polynucleotide can be used in linkage analysis. Linkage analysis establishes coinheritance between a chromosomal location and presentation of a particular disease. (Disease mapping data are found, for example, in V. McKusick, Mendelian Inheritance in Man (available on line through Johns Hopkins University Welch Medical Library)). Column 10 of Table 1A provides an OMIM reference identification number of diseases associated with the cytologic band disclosed in column 9 of Table 1A, as determined using techniques described herein and by reference to Table 5. Assuming I megabase mapping resolution and one gene per 20 kb, a cDNA precisely localized to a chromosomal region associated with the disease could be one of 50-500 potential causative genes.

[0356] Thus, once coinheritance is established, differences in a polynucleotide of the invention and the corresponding gene between affected and unaffected individuals can be examined. First, visible structural alterations in the chromosomes, such as deletions or translocations, are examined in chromosome spreads or by PCR. If no structural alterations exist, the presence of point mutations are ascertained. Mutations observed in some or all affected individuals, but not in normal individuals, indicates that the mutation may cause the disease. However, complete sequencing of the polypeptide and the corresponding gene from several normal individuals is required to distinguish the mutation from a polymorphism. If a new polymorphism is identified, this polymorphic polypeptide can be used for further linkage analysis.

[0357] Furthermore, increased or decreased expression of the gene in affected individuals as compared to unaffected individuals can be assessed using the polynucleotides of the invention. Any of these alterations (altered expression, chromosomal rearrangement, or mutation) can be used as a diagnostic or prognostic marker. Diagnostic and prognostic methods, kits and reagents encompassed by the present invention are briefly described below and more thoroughly elsewhere herein (see e.g., the sections labeled “Antibodies”, “Diagnostic Assays”, and “Methods for Detecting Diseases”).

[0358] Thus, the invention also provides a diagnostic method useful during diagnosis of a disorder, involving measuring the expression level of polynucleotides of the present invention in cells or body fluid from an individual and comparing the measured gene expression level with a standard level of polynucleotide expression level, whereby an increase or decrease in the gene expression level compared to the standard is indicative of a disorder. Additional non-limiting examples of diagnostic methods encompassed by the present invention are more thoroughly described elsewhere herein (see, e.g., Example 12).

[0359] In still another embodiment, the invention includes a kit for analyzing samples for the presence of proliferative and/or cancerous polynucleotides derived from a test subject. In a general embodiment, the kit includes at least one polynucleotide probe containing a nucleotide sequence that will specifically hybridize with a polynucleotide of the invention and a suitable container. In a specific embodiment, the kit includes two polynucleotide probes defining an internal region of the polynucleotide of the invention, where each probe has one strand containing a 31'mer-end internal to the region. In a further embodiment, the probes may be useful as primers for polymerase chain reaction amplification.

[0360] Where a diagnosis of a related disorder, including, for example, diagnosis of a tumor, has already been made according to conventional methods, the present invention is useful as a prognostic indicator, whereby patients exhibiting enhanced or depressed polynucleotide of the invention expression will experience a worse clinical outcome relative to patients expressing the gene at a level nearer the standard level.

[0361] By “measuring the expression level of polynucleotides of the invention” is intended qualitatively or quantitatively measuring or estimating the level of the polypeptide of the invention or the level of the mRNA encoding the polypeptide of the invention in a first biological sample either directly (e.g., by determining or estimating absolute protein level or mRNA level) or relatively (e.g., by comparing to the polypeptide level or mRNA level in a second biological sample). Preferably, the polypeptide level or mRNA level in the first biological sample is measured or estimated and compared to a standard polypeptide level or mRNA level, the standard being taken from a second biological sample obtained from an individual not having the related disorder or being determined by averaging levels from a population of individuals not having a related disorder. As will be appreciated in the art, once a standard polypeptide level or mRNA level is known, it can be used repeatedly as a standard for comparison.

[0362] By “biological sample” is intended any biological sample obtained from an -individual, body fluid, cell line, tissue culture, or other source which contains polypeptide of the present invention or the corresponding mRNA. As indicated, biological samples include body fluids (such as semen, lymph, vaginal pool, sera, plasma, urine, synovial fluid and spinal fluid) which contain the polyp eptide of the present invention, and tissue sources found to express the polypeptide of the present invention. Methods for obtaining tissue biopsies and body fluids from mammals are well known in the art. Where the biological sample is to include mRNA, a tissue biopsy is the preferred source.

[0363] The method(s) provided above may preferably be applied in a diagnostic method and/or kits in which polynucleotides and/or polypeptides of the invention are attached to a solid support. In one exemplary method, the support may be a “gene chip” or a “biological chip” as described in U.S. Pat. Nos. 5,837,832, 5,874,219, and 5,856,174. Further, such a gene chip with polynucleotides of the invention attached may be used to identify polymorphisms between the isolated polynucleotide sequences of the invention, with polynucleotides isolated from a test subject. The knowledge of such polymorphisms (i.e. their location, as well as, their existence) would be beneficial in identifying disease loci for many disorders, such as for example, in neural disorders, immune system disorders, muscular disorders, reproductive disorders, gastrointestinal disorders, pulmonary disorders, digestive disorders, metabolic disorders, cardiovascular disorders, renal disorders, proliferative disorders, and/or cancerous diseases and conditions. Such a method is described in U.S. Pat. Nos. 5,858,659 and 5,856,104. The U.S. patents referenced supra are hereby incorporated by reference in their entirety herein.

[0364] The present invention encompasses polynucleotides of the present invention that are chemically synthesized, or reproduced as peptide nucleic acids (PNA), or according to other methods known in the art. The use of PNAs would serve as the preferred form if the polynucleotides of the invention are incorporated onto a solid support, or gene chip. For the purposes of the present invention, a peptide nucleic acid (PNA) is a polyamide type of DNA analog and the monomeric units for adenine, guanine, thymine and cytosine are available commercially (Perceptive Biosystems). Certain components of DNA, such as phosphorus, phosphorus oxides, or deoxyribose derivatives, are not present in PNAs. As disclosed by Nielsen et al., Science 254, 1497 (1991); and Egholm et al., Nature 365, 666 (1993), PNAs bind specifically and tightly to complementary DNA strands and are not degraded by nucleases. In fact, PNA binds more strongly to DNA than DNA itself does. This is probably because there is no electrostatic repulsion between the two strands, and also the polyamide backbone is more flexible. Because of this, PNA/DNA duplexes bind under a wider range of stringency conditions than DNA/DNA duplexes, making it easier to perform multiplex hybridization. Smaller probes can be used than with DNA due to the strong binding. In addition, it is more likely that single base mismatches can be determined with PNA/DNA hybridization because a single mismatch in a PNA/DNA 15-mer lowers the melting point (T.sub.m) by 8°-20° C., vs. 4°-16° C. for the DNA/DNA 15-mer duplex. Also, the absence of charge groups in PNA means that hybridization can be done at low ionic strengths and reduce possible interference by salt during the analysis.

[0365] The compounds of the present invention have uses which include, but are not limited to, detecting cancer in mammals. In particular the invention is useful during diagnosis of pathological cell proliferative neoplasias which include, but are not limited to: acute myelogenous leukemias including acute monocytic leukemia, acute myeloblastic leukemia, acute promyelocytic leukemia, acute myelomonocytic leukemia, acute erythroleukemia, acute megakaryocytic leukemia, and acute undifferentiated leukemia, etc.; and chronic myelogenous leukemias including chronic myelomonocytic leukemia, chronic granulocytic leukemia, etc. Preferred mammals include monkeys, apes, cats, dogs, cows, pigs, horses, rabbits and humans. Particularly preferred are humans.

[0366] Pathological cell proliferative disorders are often associated with inappropriate activation of proto-oncogenes. (Gelmann, E. P. et al., “The Etiology of Acute Leukemia: Molecular Genetics and Viral Oncology,” in Neoplastic Diseases of the Blood, Vol 1., Wiernik, P. H. et al. eds., 161-182 (1985)). Neoplasias are now believed to result from the qualitative alteration of a normal cellular gene product, or from the quantitative modification of gene expression by insertion into the chromosome of a viral sequence, by chromosomal translocation of a gene to a more actively transcribed region, or by some other mechanism. (Gelmann et al., supra) It is likely that mutated or altered expression of specific genes is involved in the pathogenesis of some leukemias, among other tissues and cell types. (Gelmann et al., supra) Indeed, the human counterparts of the oncogenes involved in some animal neoplasias have been amplified or translocated in some cases of human leukemia and carcinoma. (Gelmann et al., supra)

[0367] For example, c-myc expression is highly amplified in the non-lymphocytic leukemia cell line HL-60. When HL-60 cells are chemically induced to stop proliferation, the level of c-myc is found to be downregulated. (International Publication Number WO 91/15580). However, it has been shown that exposure of HL-60 cells to a DNA construct that is complementary to the 5′ end of c-myc or c-myb blocks translation of the corresponding mRNAs which downregulates expression of the c-myc or c-myb proteins and causes arrest of cell proliferation and differentiation of the treated cells. (International Publication Number WO 91/15580; Wickstrom et al., Proc. Natl. Acad. Sci. 85:1028 (1988); Anfossi et al., Proc. Natl. Acad. Sci. 86:3379 (1989)). However, the skilled artisan would appreciate the present invention's usefulness is not be limited to treatment, prevention, and/or prognosis of proliferative disorders of cells and tissues of hematopoietic origin, in light of the numerous cells and cell types of varying origins which are known to exhibit proliferative phenotypes.

[0368] In addition to the foregoing, a polynucleotide of the present invention can be used to control gene expression through triple helix formation or through antisense DNA or RNA. Antisense techniques are discussed, for example, in Okano, J. Neurochem. 56: 560 (1991); “Oligodeoxynucleotides as Antisense Inhibitors of Gene Expression, CRC Press, Boca Raton, Fla. (1988). Triple helix formation is discussed in, for instance Lee et al., Nucleic Acids Research 6: 3073 (1979); Cooney et al., Science 241: 456 (1988); and Dervan et al., Science 251: 1360 (1991). Both methods rely on binding of the polynucleotide to a complementary DNA or RNA. For these techniques, preferred polynucleotides are usually oligonucleotides 20 to 40 bases in length and complementary to either the region of the gene involved in transcription (triple helix see Lee et al., Nucl. Acids Res. 6:3073 (1979); Cooney et al., Science 241:456 (1988); and Dervan et al., Science 251:1360 (1991)) or to the mRNA itself (antisense Okano, J. Neurochem. 56:560 (1991); Oligodeoxy-nucleotides as Antisense Inhibitors of Gene Expression, CRC Press, Boca Raton, Fla. (1988)). Triple helix formation optimally results in a shut-off of RNA transcription from DNA, while antisense RNA hybridization blocks translation of an mRNA molecule into polypeptide. The oligonucleotide described above can also be delivered to cells such that the antisense RNA or DNA may be expressed in vivo to inhibit production of polypeptide of the present invention antigens. Both techniques are effective in model systems, and the information disclosed herein can be used to design antisense or triple helix polynucleotides in an effort to treat disease, and in particular, for the treatment of proliferative diseases and/or conditions. Non-limiting antisense and triple helix methods encompassed by the present invention are more thoroughly described elsewhere herein (see, e.g., the section labeled “Antisense and Ribozyme (Antagonists)”).

[0369] Polynucleotides of the present invention are also useful in gene therapy. One goal of gene therapy is to insert a normal gene into an organism having a defective gene, in an effort to correct the genetic defect. The polynucleotides disclosed in the present invention offer a means of targeting such genetic defects in a highly accurate manner. Another goal is to insert a new gene that was not present in the host genome, thereby producing a new trait in the host cell. Additional non-limiting examples of gene therapy methods encompassed by the present invention are more thoroughly described elsewhere herein (see, e.g., the sections labeled “Gene Therapy Methods”, and Examples 16, 17 and 18).

[0370] The polynucleotides are also useful for identifying individuals from minute biological samples. The United States military, for example, is considering the use of restriction fragment length polymorphism (RFLP) for identification of its personnel. In this technique, an individual's genomic DNA is digested with one or more restriction enzymes, and probed on a Southern blot to yield unique bands for identifying personnel. This method does not suffer from the current limitations of “Dog Tags” which can be lost, switched, or stolen, making positive identification difficult. The polynucleotides of the present invention can be used as additional DNA markers for RFLP.

[0371] The polynucleotides of the present invention can also be used as an alternative to RFLP, by determining the actual base-by-base DNA sequence of selected portions of an individual's genome. These sequences can be used to prepare PCR primers for amplifying and isolating such selected DNA, which can then be sequenced. Using this technique, individuals can be identified because each individual will have a unique set of DNA sequences. Once an unique ID database is established for an individual, positive identification of that individual, living or dead, can be made from extremely small tissue samples.

[0372] Forensic biology also benefits from using DNA-based identification techniques as disclosed herein. DNA sequences taken from very small biological samples such as tissues, e.g., hair or skin, or body fluids, e.g., blood, saliva, semen, synovial fluid, amniotic fluid, breast milk, lymph, pulmonary sputum or surfactant, urine, fecal matter, etc., can be amplified using PCR. In one prior art technique, gene sequences amplified from polymorphic loci, such as DQa class II HLA gene, are used in forensic biology to identify individuals. (Erlich, H., PCR Technology, Freeman and Co. (1992)). Once these specific polymorphic loci are amplified, they are digested with one or more restriction enzymes, yielding an identifying set of bands on a Southern blot probed with DNA corresponding to the DQa class 11 ALA gene. Similarly, polynucleotides of the present invention can be used as polymorphic markers for forensic purposes.

[0373] There is also a need for reagents capable of identifying the source of a particular tissue. Such need arises, for example, in forensics when presented with tissue of unknown origin. Appropriate reagents can comprise, for example, DNA probes or primers prepared from the sequences of the present invention, specific to tissues, including but not limited to those shown in Table 1A. Panels of such reagents can identify tissue by species and/or by organ type. In a similar fashion, these reagents can be used to screen tissue cultures for contamination. Additional non-limiting examples of such uses are further described herein.

[0374] The polynucleotides of the present invention are also useful as hybridization probes for differential identification of the tissue(s) or cell type(s) present in a biological sample. Similarly, polypeptides and antibodies directed to polypeptides of the present invention are useful to provide immunological probes for differential identification of the tissue(s) (e.g., immunohistochemistry assays) or cell type(s) (e.g., immunocytochemistry assays). In addition, for a number of disorders of the above tissues or cells, significantly higher or lower levels of gene expression of the polynucleotides/polypeptides of the present invention may be detected in certain tissues (e.g., tissues expressing polypeptides and/or polynucleotides of the present invention, for example, those disclosed in column 8 of Table 1A, and/or cancerous and/or wounded tissues) or bodily fluids (e.g., semen, lymph, vaginal pool, serum, plasma, urine, synovial fluid or spinal fluid) taken from an individual having such a disorder, relative to a “standard” gene expression level, i.e., the expression level in healthy tissue from an individual not having the disorder.

[0375] Thus, the invention provides a diagnostic method of a disorder, which involves: (a) assaying gene expression level in cells or body fluid of an individual; (b) comparing the gene expression level with a standard gene expression level, whereby an increase or decrease in the assayed gene expression level compared to the standard expression level is indicative of a disorder.

[0376] In the very least, the polynucleotides of the present invention can be used as molecular weight markers on Southern gels, as diagnostic probes for the presence of a specific mRNA in a particular cell type, as a probe to “subtract-out” known sequences in the process of discovering novel polynucleotides, for selecting and making oligomers for attachment to a “gene chip” or other support, to raise anti-DNA antibodies using DNA immunization techniques, and as an antigen to elicit an immune response.

[0377] Uses of the Polypeptides

[0378] Each of the polypeptides identified herein can be used in numerous ways. The following description should be considered exemplary and utilizes known techniques.

[0379] Polypeptides and antibodies directed to polypeptides of the present invention are useful to provide immunological probes for differential identification of the tissue(s) (e.g., immunohistochemistry assays such as, for example, ABC immunoperoxidase (Hsu et al., J. Histochem. Cytochem. 29:577-580 (1981)) or cell type(s) (e.g., immunocytochemistry assays).

[0380] Antibodies can be used to assay levels of polypeptides encoded by polynucleotides of the invention in a biological sample using classical immunohistological methods known to those of skill in the art (e.g., see Jalkanen, et al., J. Cell. Biol. 101-:976-985 (1985); Jalkanen, et al., J. Cell. Biol. 105:3087-3096 (1987)). Other antibody-based methods useful for detecting protein gene expression include immunoassays, such as the enzyme linked immunosorbent assay (ELISA) and the radioimmunoassay (RIA). Suitable antibody assay labels are known in the art and include enzyme labels, such as, glucose oxidase; radioisotopes, such as iodine (¹³¹I, ¹²⁵I, ¹²³I, ¹²¹I), carbon (¹⁴C), sulfur (³⁵S), tritium (³H), indium (^{115m}In, ^{113m}In, ¹¹²In, ¹¹¹In), and technetium (⁹⁹Tc, ^{99m}Tc), thallium (²⁰¹Ti), gallium (⁶⁸Ga, ⁶⁷Ga), palladium (¹⁰³Pd), molybdenum (⁹⁹Mo), xenon (¹³³Xe), fluorine (¹⁸F), ¹⁵³Sm, ¹⁷⁷Lu, ¹⁵⁹Gd, ¹⁴⁹Pm, ¹⁴⁰La, ¹⁷⁵Yb, ¹⁶⁶Ho, ⁹⁰Y, ⁴⁷Sc, ¹⁸⁶Re, ¹⁸⁸Re, ¹⁴²Pr, ¹⁰⁵Rh, ⁹⁷Ru; luminescent labels, such as luminol; and fluorescent labels, such as fluorescein and rhodamine, and biotin.

[0381] In addition to assaying levels of polypeptide of the present invention in a biological sample, proteins can also be detected in vivo by imaging. Antibody labels or markers for in vivo imaging of protein include those detectable by X-radiography, NMR or ESR. For X-radiography, suitable labels include radioisotopes such as barium or cesium, which emit detectable radiation but are not overtly harmful to the subject. Suitable markers for NMR and ESR include those with a detectable characteristic spin, such as deuterium, which may be incorporated into the antibody by labeling of nutrients for the relevant hybridoma.

[0382] A protein-specific antibody or antibody fragment which has been labeled with an appropriate detectable imaging moiety, such as a radioisotope (for example, ¹³¹I, ¹¹²In, ^{99m}Tc, (¹³¹I, ¹²⁵I, ¹²³I, ¹²¹I), carbon (¹⁴C), sulfur (³⁵S), tritium (³H), indium (^{115m}In, ^{113m}In, ¹¹²In, ¹¹¹In), and technetium (⁹⁹Tc, ^{99m}Tc), thallium (²⁰¹Ti), gallium (⁶⁸Ga, ⁶⁷Ga), palladium (¹⁰³Pd), molybdenum (⁹⁹Mo), xenon (¹³³Xe), fluorine (¹⁸F, ¹⁵³Sm, ¹⁷⁷Lu, ¹⁵⁹Gd, ¹⁴⁹Pm, ¹⁴⁰La, ¹⁷⁵Yb, ¹⁶⁶Ho, ⁹⁰Y, ⁴⁷Sc, ¹⁸⁶Re, ¹⁸⁸Re, ¹⁴²Pr, ¹⁰⁵Rh, ⁹⁷Ru), a radio-opaque substance, or a material detectable by nuclear magnetic resonance, is introduced (for example, parenterally, subcutaneously or intraperitoneally) into the mammal to be examined for immune system disorder. It will be understood in the art that the size of the subject and the imaging system used will determine the quantity of imaging moiety needed to produce diagnostic images. In the case of a radioisotope moiety, for a human subject, the quantity of radioactivity injected will normally range from about 5 to 20 millicuries of ^{99m}Tc. The labeled antibody or antibody fragment will then preferentially accumulate at the location of cells which express the polypeptide encoded by a polynucleotide of the invention. In vivo tumor imaging is described in S.W. Burchiel et al., “Immunopharmacokinetics of Radiolabeled Antibodies and Their Fragments” (Chapter 13 in Tumor Imaging: The Radiochemical Detection of Cancer, S. W. Burchiel and B. A. Rhodes, eds., Masson Publishing Inc. (1982)).

[0383] In one embodiment, the invention provides a method for the specific delivery of compositions of the invention to cells by administering polypeptides of the invention (e.g., polypeptides encoded by polynucleotides of the invention and/or antibodies) that are associated with heterologous polypeptides or nucleic acids. In one example, the invention provides a method for delivering a therapeutic protein into the targeted cell. In another example, the invention provides a method for delivering a single stranded nucleic acid (e.g., antisense or ribozymes) or double stranded nucleic acid (e.g., DNA that can integrate into the cell's genome or replicate episomally and that can be transcribed) into the targeted cell.

[0384] In another embodiment, the invention provides a method for the specific destruction of cells (e.g., the destruction of tumor cells) by administering polypeptides of the invention in association with toxins or cytotoxic prodrugs.

[0385] By “toxin” is meant one or more compounds that bind and activate endogenous cytotoxic effector systems, radioisotopes, holotoxins, modified toxins, catalytic subunits of toxins, or any molecules or enzymes not normally present in or on the surface of a cell that under defined conditions cause the cell's death. Toxins that may be used according to the methods of the invention include, but are not limited to, radioisotopes known in the art, compounds such as, for example, antibodies (or complement fixing containing portions thereof) that bind an inherent or induced endogenous cytotoxic effector system, thymidine kinase, endonuclease, RNAse, alpha toxin, ricin, abrin, Pseudomonas exotoxin A, diphtheria toxin, saporin, momordin, gelonin, pokeweed antiviral protein, alpha-sarcin and cholera toxin. “Toxin” also includes a cytostatic or cytocidal agent, a therapeutic agent or a radioactive metal ion, e.g., alpha-emitters such as, for example, ²¹³Bi, or other radioisotopes such as, for example, ¹⁰³Pd, ¹³³Xe, ¹³¹I, ⁶⁸Ge, ⁵⁷Co, ⁶⁵Zn, ⁸⁵Sr, ³²P, ³⁵S, ⁹⁰Y, ¹⁵³Sm, ¹⁵³Gd, ¹⁶⁹Yb, ⁵¹Cr, ⁵⁴Mn, ⁷⁵Se, ¹¹³Sn, ⁹⁰Yttrium, ¹¹⁷Tin, ¹⁸⁶Rhenium, ¹⁶⁶Holmium, and ¹⁸⁸Rhenium; luminescent labels, such as luminol; and fluorescent labels, such as fluorescein and rhodamine, and biotin. In a specific embodiment, the invention provides a method for the specific destruction of cells (e.g., the destruction of tumor cells) by administering polypeptides of the invention or antibodies of the invention in association with the radioisotope ⁹⁰Y. In another specific embodiment, the invention provides a method for the specific destruction of cells (e.g., the destruction of tumor cells) by administering polypeptides of the invention or antibodies of the invention in association with the radioisotope ¹¹¹In. In a further specific embodiment, the invention provides a method for the specific destruction of cells (e.g., the destruction of tumor cells) by administering polypeptides of the invention or antibodies of the invention in association with the radioisotope ¹³¹I.

[0386] Techniques known in the art may be applied to label polypeptides of the invention (including antibodies). Such techniques include, but are not limited to, the use of bifunctional conjugating agents (see e.g., U.S. Pat. Nos. 5,756,065; 5,714,631; 5,696,239; 5,652,361; 5,505,931; 5,489,425; 5,435,990; 5,428,139; 5,342,604; 5,274,119; 4,994,560; and 5,808,003; the contents of each of which are hereby incorporated by reference in its entirety).

[0387] Thus, the invention provides a diagnostic method of a disorder, which involves (a) assaying the expression level of a polypeptide of the present invention in cells or body fluid of an individual; and (b) comparing the assayed polypeptide expression level with a standard polypeptide expression level, whereby an increase or decrease in the assayed polypeptide expression level compared to the standard expression level is indicative of a disorder. With respect to cancer, the presence of a relatively high amount of transcript in biopsied tissue from an individual may indicate a predisposition for the development of the disease, or may provide a means for detecting the disease prior to the appearance of actual clinical symptoms. A more definitive diagnosis of this type may allow health professionals to employ preventative measures or aggressive treatment earlier thereby preventing the development or further progression of the cancer.

[0388] Moreover, polypeptides of the present invention can be used to treat or prevent diseases or conditions such as, for example, neural disorders, immune system disorders, muscular disorders, reproductive disorders, gastrointestinal disorders, pulmonary disorders, cardiovascular disorders, renal disorders, proliferative disorders, and/or cancerous diseases and conditions. For example, patients can be administered a polypeptide of the present invention in an effort to replace absent or decreased levels of the polypeptide (e.g., insulin), to supplement absent or decreased levels of a different polypeptide (e.g., hemoglobin S for hemoglobin B, SOD, catalase, DNA repair proteins), to inhibit the activity of a polypeptide (e.g., an oncogene or tumor supressor), to activate the activity of a polypeptide (e.g., by binding to a receptor), to reduce the activity of a membrane bound receptor by competing with it for free ligand (e.g., soluble TNF receptors used in reducing inflammation), or to bring about a desired response (e.g., blood vessel growth inhibition, enhancement of the immune response to proliferative cells or tissues).

[0389] Similarly, antibodies directed to a polypeptide of the present invention can also be used to treat disease (as described supra, and elsewhere herein). For example, administration of an antibody directed to a polypeptide of the present invention can bind, and/or neutralize the polypeptide, and/or reduce overproduction of the polypeptide. Similarly, administration of an antibody can activate the polypeptide, such as by binding to a polypeptide bound to a membrane (receptor).

[0390] At the very least, the polypeptides of the present invention can be used as molecular weight markers on SDS-PAGE gels or on molecular sieve gel filtration columns using methods well known to those of skill in the art. Polypeptides can also be used to raise antibodies, which in turn are used to measure protein expression from a recombinant cell, as a way of assessing transformation of the host cell. Moreover, the polypeptides of the present invention can be used to test the biological activities described herein.

[0391] Diagnostic Assays

[0392] The compounds of the present invention are useful for diagnosis, treatment, prevention and/or prognosis of various disorders in mammals, preferably humans. Such disorders include, but are not limited to, those described herein under the section heading “Biological Activities”.

[0393] For a number of disorders, substantially altered (increased or decreased) levels of gene expression can be detected in tissues, cells or bodily fluids (e.g., sera, plasma, urine, semen, synovial fluid or spinal fluid) taken from an individual having such a disorder, relative to a “standard” gene expression level, that is, the expression level in tissues or bodily fluids from an individual not having the disorder. Thus, the invention provides a diagnostic method useful during diagnosis of a disorder, which involves measuring the expression level of the gene encoding the polypeptide in tissues, cells or body fluid from an individual and comparing the measured gene expression level with a standard gene expression level, whereby an increase or decrease in the gene expression level(s) compared to the standard is indicative of a disorder. These diagnostic assays may be performed in vivo or in vitro, such as, for example, on blood samples, biopsy tissue or autopsy tissue.

[0394] The present invention is also useful as a prognostic indicator, whereby patients exhibiting enhanced or depressed gene expression will experience a worse clinical outcome relative to patients expressing the gene at a level nearer the standard level.

[0395] In certain embodiments, a polypeptide of the invention, or polynucleotides, antibodies, agonists, or antagonists corresponding to that polypeptide, may be used to diagnose and/or prognose diseases and/or disorders associated with the tissue(s) in which the polypeptide of the invention is expressed, including one, two, three, four, five, or more tissues disclosed in Table 1A, column 8 (Tissue Distribution Library Code).

[0396] By “assaying the expression level of the gene encoding the polypeptide” is intended qualitatively or quantitatively measuring or estimating the level of the polypeptide of the invention or the level of the mRNA encoding the polypeptide of the invention in a first biological sample either directly (e.g., by determining or estimating absolute protein level or mRNA level) or relatively (e.g., by comparing to the polypeptide level or mRNA level in a second biological sample). Preferably, the polypeptide expression level or mRNA level in the first biological sample is measured or estimated and compared to a standard polypeptide level or mRNA level, the standard being taken from a second biological sample obtained from an individual not having the disorder or being determined by averaging levels from a population of individuals not having the disorder. As will be appreciated in the art, once a standard polypeptide level or mRNA level is known, it can be used repeatedly as a standard for comparison.

[0397] By “biological sample” is intended any biological sample obtained from an individual, cell line, tissue culture, or other source containing polypeptides of the invention (including portions thereof) or mRNA. As indicated, biological samples include body fluids (such as sera, plasma, urine, synovial fluid and spinal fluid) and tissue sources found to express the full length or fragments thereof of a polypeptide or mRNA. Methods for obtaining tissue biopsies and body fluids from mammals are well known in the art. Where the biological sample is to include mRNA, a tissue biopsy is the preferred source.

[0398] Total cellular RNA can be isolated from a biological sample using any suitable technique such as the single-step guanidinium-thiocyanate-phenol-chloroform method described in Chomczynski and Sacchi, Anal. Biochem. 162:156-159 (1987). Levels of mRNA encoding the polypeptides of the invention are then assayed using any appropriate method. These include Northern blot analysis, S1 nuclease mapping, the polymerase chain reaction (PCR), reverse transcription in combination with the polymerase chain reaction (RT-PCR), and reverse transcription in combination with the ligase chain reaction (RT-LCR).

[0399] The present invention also relates to diagnostic assays such as quantitative and diagnostic assays for detecting levels of polypeptides of the invention, in a biological sample (e.g., cells and tissues), including determination of normal and abnormal levels of polypeptides. Thus, for instance, a diagnostic assay in accordance with the invention for detecting over-expression of polypeptides of the invention compared to normal control tissue samples may be used to detect the presence of tumors. Assay techniques that can be used to determine levels of a polypeptide, such as a polypeptide of the present invention in a sample derived from a host are well-known to those of skill in the art. Such assay methods include radioimmunoassays, competitive-binding assays, Western Blot analysis and ELISA assays. Assaying polypeptide levels in a biological sample can occur using any art-known method.

[0400] Assaying polypeptide levels in a biological sample can occur using antibody-based techniques. For example, polypeptide expression in tissues can be studied with classical immunohistological methods (Jalkanen et al., J. Cell. Biol. 101:976-985 (1985); Jalkanen, M., et al., J. Cell. Biol. 105:3087-3096 (1987)). Other antibody-based methods useful for detecting polypeptide gene expression include immunoassays, such as the enzyme linked immunosorbent assay (ELISA) and the radioimmunoassay (RIA). Suitable antibody assay labels are known in the art and include enzyme labels, such as, glucose oxidase, and radioisotopes, such as iodine (¹²⁵I, ¹²¹I), carbon (¹⁴C), sulfur (³⁵S), tritium (³H), indium (¹¹²In), and technetium (^{99m}Tc), and fluorescent labels, such as fluorescein and rhodamine, and biotin.

[0401] The tissue or cell type to be analyzed will generally include those which are known, or suspected, to express the gene of inteest (such as, for example, cancer). The protein isolation methods employed herein may, for example, be such as those described in Harlow and Lane (Harlow, E. and Lane, D., 1988, “Antibodies: A Laboratory Manual”, Cold Spring Harbor Laboratory Press, Cold Spring Harbor, N.Y.), which is incorporated herein by reference in its entirety. The isolated cells can be derived from cell culture or from a patient. The analysis of cells taken from culture may be a necessary step in the assessment of cells that could be used as part of a cell-based gene therapy technique or, alternatively, to test the effect of compounds on the expression of the gene.

[0402] For example, antibodies, or fragments of antibodies, such as those described herein, may be used to quantitatively or qualitatively detect the presence of gene products or conserved variants or peptide fragments thereof. This can be accomplished, for example, by immunofluorescence techniques employing a fluorescently labeled antibody coupled with light microscopic, flow cytometric, or fluorimetric detection.

[0403] In a preferred embodiment, antibodies, or fragments of antibodies directed to any one or all of the predicted epitope domains of the polypeptides of the invention (shown in column 7 of Table 1A) may be used to quantitatively or qualitatively detect the presence of gene products or conserved variants or peptide fragments thereof. This can be accomplished, for example, by immunofluorescence techniques employing a fluorescently labeled antibody coupled with light microscopic, flow cytometric, or fluorimetric detection.

[0404] In an additional preferred embodiment, antibodies, or fragments of antibodies directed to a conformational epitope of a polypeptide of the invention may be used to quantitatively or qualitatively detect the presence of gene products or conserved variants or peptide fragments thereof. This can be accomplished, for example, by immunofluorescence techniques employing a fluorescently labeled antibody coupled with light microscopic, flow cytometric, or fluorimetric detection.

[0405] The antibodies (or fragments thereof), and/or polypeptides of the present invention may, additionally, be employed histologically, as in immunofluorescence, immunoelectron microscopy or non-immunological assays, for in situ detection of gene products or conserved variants or peptide fragments thereof. In situ detection may be accomplished by removing a histological specimen from a patient, and applying thereto a labeled antibody or polypeptide of the present invention. The antibody (or fragment thereof) or polypeptide is preferably applied by overlaying the labeled antibody (or fragment) onto a biological sample. Through the use of such a procedure, it is possible to determine not only the presence of the gene product, or conserved variants or peptide fragments, or polypeptide binding, but also its distribution in the examined tissue. Using the present invention, those of ordinary skill will readily perceive that any of a wide variety of histological methods (such as staining procedures) can be modified in order to achieve such in situ detection.

[0406] Immunoassays and non-immunoassays for gene products or conserved variants or peptide fragments thereof will typically comprise incubating a sample, such as a biological fluid, a tissue extract, freshly harvested cells, or lysates of cells which have been incubated in cell culture, in the presence of a detectably labeled antibody capable of binding gene products or conserved variants or peptide fragments thereof, and detecting the bound antibody by any of a number of techniques well-known in the art.

[0407] The biological sample may be brought in contact with and immobilized onto a solid phase support or carrier such as nitrocellulose, or other solid support which is capable of immobilizing cells, cell particles or soluble proteins. The support may then be washed with suitable buffers followed by treatment with the detectably labeled antibody or detectable polypeptide of the invention. The solid phase support may then be washed with the buffer a second time to remove unbound antibody or polypeptide. Optionally the antibody is subsequently labeled. The amount of bound label on solid support may then be detected by conventional means.

[0408] By “solid phase support or carrier” is intended any support capable of binding an antigen or an antibody. Well-known supports or carriers include glass, polystyrene, polypropylene, polyethylene, dextran, nylon, amylases, natural and modified celluloses, polyacrylamides, gabbros, and magnetite. The nature of the carrier can be either soluble to some extent or insoluble for the purposes of the present invention. The support material may have virtually any possible structural configuration so long as the coupled molecule is capable of binding to an antigen or antibody. Thus, the support configuration may be spherical, as in a bead, or cylindrical, as in the inside surface of a test tube, or the external surface of a rod. Alternatively, the surface may be flat such as a sheet, test strip, etc. Preferred supports include polystyrene beads. Those skilled in the art will know many other suitable carriers for binding antibody or antigen, or will be able to ascertain the same by use of routine experimentation.

[0409] The binding activity of a given lot of antibody or antigen polypeptide may be determined according to well known methods. Those skilled in the art will be able to determine operative and optimal assay conditions for each determination by employing routine experimentation.

[0410] In addition to assaying polypeptide levels or polynucleotide levels in a biological sample obtained from an individual, polypeptide or polynucleotide can also be detected in vivo by imaging. For example, in one embodiment of the invention, polypeptides and/or antibodies of the invention are used to image diseased cells, such as neoplasms. In another embodiment, polynucleotides of the invention (e.g., polynucleotides complementary to all or a portion of an mRNA) and/or antibodies (e.g., antibodies directed to any one or a combination of the epitopes of a polypeptide of the invention, antibodies directed to a conformational epitope of a polypeptide of the invention, or antibodies directed to the full length polypeptide expressed on the cell surface of a mammalian cell) are used to image diseased or neoplastic cells.

[0411] Antibody labels or markers for in vivo imaging of polypeptides of the invention include those detectable by X-radiography, NMR, MRI, CAT-scans or ESR. For X-radiography, suitable labels include radioisotopes such as barium or cesium, which emit detectable radiation but are not overtly harmful to the subject. Suitable markers for NMR and ESR include those with a detectable characteristic spin, such as deuterium, which may be incorporated into the antibody by labeling of nutrients for the relevant hybridoma. Where in vivo imaging is used to detect enhanced levels of polypeptides for diagnosis in humans, it may be preferable to use human antibodies or “humanized” chimeric monoclonal antibodies. Such antibodies can be produced using techniques described herein or otherwise known in the art. For example methods for producing chimeric antibodies are known in the art. See, for review, Morrison, Science 229:1202 (1985); Oi et al., BioTechniques 4:214 (1986); Cabilly et al., U.S. Pat. No. 4,816,567; Taniguchi et al., EP 171496; Morrison et al., EP 173494; Neuberger et al., WO 8601533; Robinson et al., WO 8702671; Boulianne et al., Nature 312:643 (1984); Neuberger et al., Nature 314:268 (1985).

[0412] Additionally, any polypeptides of the invention whose presence can be detected, can be administered. For example, polypeptides of the invention labeled with a radio-opaque or other appropriate compound can be administered and visualized in vivo, as discussed, above for labeled antibodies. Further, such polypeptides can be utilized for in vitro diagnostic procedures.

[0413] A polypeptide-specific antibody or antibody fragment which has been labeled with an appropriate detectable imaging moiety, such as a radioisotope (for example, ¹³¹I, ¹¹²In, ^{99m}Tc), a radio-opaque substance, or a material detectable by nuclear magnetic resonance, is introduced (for example, parenterally, subcutaneously or intraperitoneally) into the mammal to be examined for a disorder. It will be understood in the art that the size of the subject and the imaging system used will determine the quantity of imaging moiety needed to produce diagnostic images. In the case of a radioisotope moiety, for a human subject, the quantity of radioactivity injected will normally range from about 5 to 20 millicuries of ^{99m}Tc. The labeled antibody or antibody fragment will then preferentially accumulate at the location of cells which contain the antigenic protein. In vivo tumor imaging is described in S. W. Burchiel et al., “Immunopharmacokinetics of Radiolabeled Antibodies and Their Fragments” (Chapter 13 in Tumor Imaging: The Radiochemical Detection of Cancer, S. W. Burchiel and B. A. Rhodes, eds., Masson Publishing Inc. (1982)).

[0414] With respect to antibodies, one of the ways in which an antibody of the present invention can be detectably labeled is by linking the same to a reporter enzyme and using the linked product in an enzyme immunoassay (EIA) (Voller, A., “The Enzyme Linked Immunosorbent Assay (ELISA)”, 1978, Diagnostic Horizons 2:1-7, Microbiological Associates Quarterly Publication, Walkersville, Md.); Voller et al., J. Clin. Pathol. 31:507-520 (1978); Butler, J. E., Meth. Enzymol. 73:482-523 (1981); Maggio, E. (ed.), 1980, Enzyme Immunoassay, CRC Press, Boca Raton, Fla.,; Ishikawa, E. et al., (eds.), 1981, Enzyme Immunoassay, Kgaku Shoin, Tokyo). The reporter enzyme which is bound to the antibody will react with an appropriate substrate, preferably a chromogenic substrate, in such a manner as to produce a chemical moiety which can be detected, for example, by spectrophotometric, fluorimetric or by visual means. Reporter enzymes which can be used to detectably label the antibody include, but are not limited to, malate dehydrogenase, staphylococcal nuclease, delta-5-steroid isomerase, yeast alcohol dehydrogenase, alpha-glycerophosphate, dehydrogenase, triose phosphate isomerase, horseradish peroxidase, alkaline phosphatase, asparaginase, glucose oxidase, beta-galactosidase, ribonuclease, urease, catalase, glucose-6-phosphate. dehydrogenase, glucoamylase and acetylcholinesterase. Additionally, the detection can be accomplished by calorimetric methods which employ a chromogenic substrate for the reporter enzyme. Detection may also be accomplished by visual comparison of the extent of enzymatic reaction of a substrate in comparison with similarly prepared standards.

[0415] Detection may also be accomplished using any of a variety of other immunoassays. For example, by radioactively labeling the antibodies or antibody fragments, it is possible to detect polypeptides through the use of a radioimmunoassay (RIA) (see, for example, Weintraub, B., Principles of Radioimmunoassays, Seventh Training Course on Radioligand Assay Techniques, The Endocrine Society, March, 1986, which is incorporated by reference herein). The radioactive isotope can be detected by means including, but not limited to, a gamma counter, a scintillation counter, or autoradiography.

[0416] It is also possible to label the antibody with a fluorescent compound. When the fluorescently labeled antibody is exposed to light of the proper wave length, its presence can then be detected due to fluorescence. Among the most commonly used fluorescent labeling compounds are fluorescein isothiocyanate, rhodamine, phycoerythrin, phycocyanin, allophycocyanin, ophthaldehyde and fluorescamine.

[0417] The antibody can also be detectably labeled using fluorescence emitting metals such as ¹⁵²Eu, or others of the lanthanide series. These metals can be attached to the antibody using such metal chelating groups as diethylenetriaminepentacetic acid (DTPA) or ethylenediaminetetraacetic acid (EDTA).

[0418] The antibody also can be detectably labeled by coupling it to a chemiluminescent compound. The presence of the chemiluminescent-tagged antibody is then determined by detecting the presence of luminescence that arises during the course of a chemical reaction. Examples of particularly useful chemiluminescent labeling compounds are luminol, isoluminol, theromatic acridinium ester, imidazole, acridinium salt and oxalate ester.

[0419] Likewise, a bioluminescent compound may be used to label the antibody of the present invention. Bioluminescence is a type of chemiluminescence found in biological systems in, which a catalytic protein increases the efficiency of the chemiluminescent reaction. The presence of a bioluminescent protein is determined by detecting the presence of luminescence. Important bioluminescent compounds for purposes of labeling are luciferin, luciferase and aequorin.

[0420] Methods for Detecting Diseases

[0421] In general, a disease may be detected in a patient based on the presence of one or more proteins of the invention and/or polynucleotides encoding such proteins in a biological sample (for example, blood, sera, urine, and/or tumor biopsies) obtained from the patient. In other words, such proteins may be used as markers to indicate the presence or absence of a disease or disorder, including cancer and/or as described elsewhere herein. In addition, such proteins may be useful for the detection of other diseases and cancers. The binding agents provided herein generally permit detection of the level of antigen that binds to the agent in the biological sample. Polynucleotide primers and probes may be used to detect the level of mRNA encoding polypeptides of the invention, which is also indicative of the presence or absence of a disease or disorder, including cancer. In general, polypeptides of the invention should be present at a level that is at least three fold higher in diseased tissue than in normal tissue.

[0422] There are a variety of assay formats known to those of ordinary skill in the art for using a binding agent to detect polypeptide markers in a sample. See, e.g., Harlow and Lane, supra. In general, the presence or absence of a disease in a patient may be determined by (a) contacting a biological sample obtained from a patient with a binding agent; (b) detecting in the sample a level of polypeptide that binds to the binding agent; and (c) comparing the level of polypeptide with a predetermined cut-off value.

[0423] In a preferred embodiment, the assay involves the use of a binding agent(s) immobilized on a solid support to bind to and remove the polypeptide of the invention from the remainder of the sample. The bound polypeptide may then be detected using a detection reagent that contains a reporter group and specifically binds to the binding agent/polypeptide complex. Such detection reagents may comprise, for example, a binding agent that specifically binds to the polypeptide or an antibody or other agent that specifically binds to the binding agent, such as an anti-immunoglobulin, protein G, protein A or a lectin. Alternatively, a competitive assay may be utilized, in which a polypeptide is labeled with a reporter group and allowed to bind to the immobilized binding agent after incubation of the binding agent with the sample. The extent to which components of the sample inhibit the binding of the labeled polypeptide to the binding agent is indicative of the reactivity of the sample with the immobilized binding agent. Suitable polypeptides for use within such assays include polypeptides of the invention and portions thereof, or antibodies, to which the binding agent binds, as described above.

[0424] The solid support may be any material known to those of skill in the art to which polypeptides of the invention may be attached. For example, the solid support may be a test well in a microtiter plate or a nitrocellulose or other suitable membrane. Alternatively, the support may be a bead or disc, such as glass fiberglass, latex or a plastic material such as polystyrene or polyvinylchloride. The support may also be a magnetic particle or a fiber optic sensor, such as those disclosed, for example, in U.S. Pat. No. 5,359,681. The binding agent may be immobilized on the solid support using a variety of techniques known to those of skill in the art, which are amply described in the patent and scientific literature. In the context of the present invention, the term “immobilization” refers to both noncovalent association, such as adsorption, and covalent attachment (which may be a direct linkage between the agent and functional groups on the support or may be a linkage by way of a cross-linking agent). Immobilization by adsorption to a well in a microtiter plate or to a membrane is preferred. In such cases, adsorption may be achieved by contacting the binding agent, in a suitable buffer, with the solid support for the suitable amount of time. The contact time varies with temperature, but is typically between about 1 hour and about 1 day. In general, contacting a well of plastic microtiter plate (such as polystyrene or polyvinylchloride) with an amount of binding agent ranging from about 10 ng to about 10 μg, and preferably about 100 ng to about 1 μg, is sufficient to immobilize an adequate amount of binding agent.

[0425] Covalent attachment of binding agent to a solid support may generally be achieved by first reacting the support with a bifunctional reagent that will react with both the support and a functional group, such as a hydroxyl or amino group, on the binding agent. For example, the binding agent may be covalently attached to supports having an appropriate polymer coating using benzoquinone or by condensation of an aldehyde group on the support with an amine and an active hydrogen on the binding partner (see, e.g., Pierce Immunotechnology Catalog and Handbook, 1991, at A12-A13).

[0426] Gene Therapy Methods

[0427] Also encompassed by the invention are gene therapy methods for treating or preventing disorders, diseases and conditions. The gene therapy methods relate to the introduction of nucleic acid (DNA, RNA and antisense DNA or RNA) sequences into an animal to achieve expression of the polypeptide of the present invention. This method requires a polynucleotide which codes for a polypeptide of the present invention operatively linked to a promoter and any other genetic elements necessary for the expression of the polypeptide by the target tissue. Such gene therapy and delivery techniques are known in the art, see, for example, WO90/11092, which is herein incorporated by reference.

[0428] Thus, for example, cells from a patient may be engineered with a polynucleotide (DNA or RNA) comprising a promoter operably linked to a polynucleotide of the present invention ex vivo, with the engineered cells then being provided to a patient to be treated with the polypeptide of the present invention. Such methods are well-known in the art. For example, see Belldegrun, A., et al., J. Natl. Cancer Inst. 85: 207-216 (1993); Ferrantini, M. et al., Cancer Research 53: 1107-1112 (1993); Ferrantini, M. et al., J. Immunology 153: 4604-4615 (1994); Kaido, T., et al., Int. J. Cancer 60: 221-229 (1995); Ogura, H., et al., Cancer Research 50: 5102-5106 (1990); Santodonato, L., et al., Human Gene Therapy 7:1-10 (1996); Santodonato, L., et al., Gene Therapy 4:1246-1255 (1997); and Zhang, J. -F. et al., Cancer Gene Therapy 3: 31-38 (1996)), which are herein incorporated by reference. In one embodiment, the cells which are engineered are arterial cells. The arterial cells may be reintroduced into the patient through direct injection to the artery, the tissues surrounding the artery, or through catheter injection.

[0429] As discussed in more detail below, the polynucleotide constructs can be delivered by any method that delivers injectable materials to the cells of an animal, such as, injection into the interstitial space of tissues (heart, muscle, skin, lung, liver, and the like). The polynucleotide constricts may be delivered in a pharmaceutically acceptable liquid or aqueous carrier.

[0430] In one embodiment, the polynucleotide of the present invention is delivered as a naked polynucleotide. The term “naked” polynucleotide, DNA or RNA refers to sequences that are free from any delivery vehicle that acts to assist, promote or facilitate entry into the cell, including viral sequences, viral particles, liposome formulations, lipofectin or precipitating agents and the like. However, the polynucleotide of the present invention can also be delivered in liposome formulations and lipofectin formulations and the like can be prepared by methods well known to those skilled in the art. Such methods are described, for example, in U.S. Pat. Nos. 5,593,972, 5,589,466, and 5,580,859, which are herein incorporated by reference.

[0431] The polynucleotide vector constructs used in the gene therapy method are preferably constructs that will not integrate into the host genome nor will they contain sequences that allow for replication. Appropriate vectors include pWLNEO, pSV2CAT, pOG44, pXT1 and pSG available from Stratagene; pSVK3, pBPV, pMSG and pSVL available from Pharmacia; and pEF1/V5, pcDNA3.1, and pRc/CMV2 available from Invitrogen. Other suitable vectors will be readily apparent to the skilled artisan.

[0432] Any strong promoter known to those skilled in the art can be used for driving the expression of the polynucleotide sequence. Suitable promoters include adenoviral promoters, such as the adenoviral major late promoter; or heterologous promoters, such as the cytomegalovirus (CMV) promoter; the respiratory syncytial virus (RSV) promoter; inducible promoters, such as the MMT promoter, the metallothionein promoter; heat shock promoters; the albumin promoter; the ApoAI promoter; human globin promoters; viral thymidine kinase promoters, such as the Herpes Simplex thymidine kinase promoter; retroviral LTRs; the b-actin promoter; and human growth hormone promoters. The promoter also may be the native promoter for the polynucleotide of the present invention.

[0433] Unlike other gene therapy techniques, one major advantage of introducing naked nucleic acid sequences into target cells is the transitory nature of the polynucleotide synthesis in the cells. Studies have shown that non-replicating DNA sequences can be introduced into cells to provide production of the desired polypeptide for periods of up to six months.

[0434] The polynucleotide construct can be delivered to the interstitial space of tissues within the an animal, including of muscle, skin, brain, lung, liver, spleen, bone marrow, thymus, heart, lymph, blood, bone, cartilage, pancreas, kidney, gall bladder, stomach, intestine, testis, ovary, uterus, rectum, nervous system, eye, gland, and connective tissue. Interstitial space of the tissues comprises the intercellular, fluid, mucopolysaccharide matrix among the reticular fibers of organ tissues, elastic fibers in the walls of vessels or chambers, collagen fibers of fibrous tissues, or that same matrix within connective tissue ensheathing muscle cells or in the lacunae of bone. It is similarly the space occupied by the plasma of the circulation and the lymph fluid of the lymphatic channels. Delivery to the interstitial space of muscle tissue is preferred for the reasons discussed below. They may be conveniently delivered by injection into the tissues comprising these cells. They are preferably delivered to and expressed in persistent, non-dividing cells which are differentiated, although delivery and expression may be achieved in non-differentiated or less completely differentiated cells, such as, for example, stem cells of blood or skin fibroblasts. In vivo muscle cells are particularly competent in their ability to take up and express polynucleotides.

[0435] For the naked nucleic acid sequence injection, an effective dosage amount of DNA or RNA will be in the range of from about 0.05 mg/kg body weight to about 50 mg/kg body weight. Preferably the dosage will be from about 0.005 mg/kg to about 20 mg/kg and more preferably from about 0.05 mg/kg to about 5 mg/kg. Of course, as the artisan of ordinary skill will appreciate, this dosage will vary according to the tissue site of injection. The appropriate and effective dosage of nucleic acid sequence can readily be determined by those of ordinary skill in the art and may depend on the condition being treated and the route of administration.

[0436] The preferred route of administration is by the parenteral route of injection into the interstitial space of tissues. However, other parenteral routes may also be used, such as, inhalation of an aerosol formulation particularly for delivery to lungs or bronchial tissues, throat or mucous membranes of the nose. In addition, naked DNA constructs can be delivered to arteries during angioplasty by the catheter used in the procedure.

[0437] The naked polynucleotides are delivered by any method known in the art, including, but not limited to, direct needle injection at the delivery site, intravenous injection, topical administration, catheter infusion, and so-called “gene guns”. These delivery methods are known in the art.

[0438] The constructs may also be delivered with delivery vehicles such as viral sequences, viral particles, liposome formulations, lipofectin, precipitating agents, etc. Such methods of delivery are known in the art.

[0439] In certain embodiments, the polynucleotide constructs are complexed in a liposome preparation. Liposomal preparations for use in the instant invention include cationic (positively charged), anionic (negatively charged) and neutral preparations. However, cationic liposomes are particularly preferred because a tight charge complex can be formed between the cationic liposome and the polyanionic nucleic acid. Cationic liposomes have been shown to mediate intracellular delivery of plasmid DNA (Felgner et al., Proc. Natl. Acad. Sci. USA (1987) 84:7413-7416, which is herein incorporated by reference); mRNA (Malone et al., Proc. Natl. Acad. Sci. USA (1989) 86:6077-6081, which is herein incorporated by reference); and purified transcription factors (Debs et al., J. Biol. Chem. (1990) 265:10189-10192, which is herein incorporated by reference), in functional form.

[0440] Cationic liposomes are readily available. For example, N[1-2,3-dioleyloxy)propyl]-N,N,N-triethylammonium (DOTMA) liposomes are particularly useful and are available under the trademark Lipofectin, from GIBCO BRL, Grand Island, N.Y. (See, also, Felgner et al., Proc. Natl Acad. Sci. USA (1987) 84:7413-7416, which is herein incorporated by reference). Other commercially available liposomes include transfectace (DDAB/DOPE) and DOTAP/DOPE (Boehringer).

[0441] Other cationic liposomes can be prepared from readily available materials using techniques well known in the art. See, e.g. PCT Publication No. WO 90/11092 (which is herein incorporated by reference) for a description of the synthesis of DOTAP (1,2-bis(oleoyloxy)-3-(trimethylammonio)propane) liposomes. Preparation of DOTMA liposomes is explained in the literature, see, e.g., P. Felgner et al., Proc. Natl. Acad. Sci. USA 84:7413-7417, which is herein incorporated by reference. Similar methods can be used to prepare liposomes from other cationic lipid-materials.

[0442] Similarly, anionic and neutral liposomes are readily available, such as from Avanti Polar Lipids (Birmingham, Ala.), or can be easily prepared using readily available materials. Such materials include phosphatidyl, choline, cholesterol, phosphatidyl ethanolamine, dioleoylphosphatidyl choline (DOPC), dioleoylphosphatidyl glycerol (DOPG), dioleoylphoshatidyl ethanolamine (DOPE), among others. These materials can also be mixed with the DOTMA and DOTAP starting materials in appropriate ratios. Methods for making liposomes using these materials are well known in the art.

[0443] For example, commercially dioleoylphosphatidyl choline (DOPC), dioleoylphosphatidyl glycerol (DOPG), and dioleoylphosphatidyl ethanolamine (DOPE) can be used in various combinations to make conventional liposomes, with or without the addition of cholesterol. Thus, for example, DOPG/DOPC vesicles can be prepared by drying 50 mg each of DOPG and DOPC under a stream of nitrogen gas into a sonication vial. The sample is placed under a vacuum pump overnight and is hydrated the following day with deionized water. The sample is then sonicated for 2 hours in a capped vial, using a Heat Systems model 350 sonicator equipped with an inverted cup (bath type) probe at the maximum setting while the bath is circulated at 15EC. Alternatively, negatively charged vesicles can be prepared without sonication to produce multilamellar vesicles or by extrusion through nucleopore membranes to produce unilamellar vesicles of discrete size. Other methods are known and available to those of skill in the art.

[0444] The liposomes can comprise multilamellar vesicles (MLVs), small unilamellar vesicles (SUVs), or large unilamellar vesicles (LUVs), with SUVs being preferred. The various liposome-nucleic acid complexes are prepared using methods well known in the art. See, e.g., Straubinger et al., Methods of Immunology (1983), 101:512-527, which is herein incorporated by reference. For example, MLVs containing nucleic acid can be prepared by depositing a thin film of phospholipid on the walls of a glass tube and subsequently hydrating with a solution of the material to be encapsulated. SUVs are prepared by extended sonication of MLVs to produce a homogeneous population of unilamellar liposomes. The material to be entrapped is added to a suspension of preformed MLVs and then sonicated. When using liposomes containing cationic lipids, the dried lipid film is resuspended in an appropriate solution such as sterile water or an isotonic buffer solution such as 10 mM Tris/NaCl, sonicated, and then the preformed liposomes are mixed directly with the DNA. The liposome and DNA form a very stable complex due to binding of the positively charged liposomes to the cationic DNA. SUVs find use with small nucleic acid fragments. LUVs are prepared by a number of methods, well known in the art. Commonly used methods include Ca²⁺-EDTA chelation (Papahadjopoulos et al., Biochim. Biophys. Acta (1975) 394:483; Wilson et al., Cell 17:77 (1979)); ether injection (Deamer, D. and Bangham, A., Biochim. Biophys. Acta 443:629 (1976); Ostro et al., Biochem. Biophys. Res. Commun. 76:836 (1977); Fraley et al., Proc. Natl. Acad. Sci. USA 76:3348 (1979)); detergent dialysis (Enoch, H. and Strittmatter, P., Proc. Natl. Acad. Sci. USA 76:145 (1979)); and reverse-phase evaporation (REV) (Fraley et al., J. Biol. Chem. 255:10431 (1980); Szoka, F. and Papahadjopoulos, D., Proc. Natl. Acad. Sci. USA 75:145 (1978); Schaefer-Ridder et al., Science 215:166 (1982)), which are herein incorporated by reference.

[0445] Generally, the ratio of DNA to liposomes will be from about 10:1 to about 1:10. Preferably, the ration will be from about 5:1 to about 1:5. More preferably, the ration will be about 3:1 to about 1:3. Still more preferably, the ratio will be about 1:1.

[0446] U.S. Pat. No. 5,676,954 (which is herein incorporated by reference) reports on the injection of genetic material, complexed with cationic liposomes carriers, into mice. U.S. Pat. Nos. 4,897,355, 4,946,787, 5,049,386, 5,459,127, 5,589,466, 5,693,622, 5,580,859, 5,703,055, and international publication no. WO 94/9469 (which are herein incorporated by reference) provide cationic lipids for use in transfecting DNA into cells and mammals. U.S. Pat. Nos. 5,589,466, 5,693,622, 5,580,859, 5,703,055, and international publication no. WO 94/9469 provide methods for delivering DNA-cationic lipid complexes to mammals.

[0447] In certain embodiments, cells are engineered, ex vivo or in vivo, using a retroviral particle containing RNA which comprises a sequence encoding a polypeptide of the present invention. Retroviruses from which the retroviral plasmid vectors may be derived include, but are not limited to, Moloney Murine Leukemia Virus, spleen necrosis virus, Rous sarcoma Virus, Harvey Sarcoma Virus, avian leukosis virus, gibbon ape leukemia virus, human immunodeficiency virus, Myeloproliferative Sarcoma Virus, and mammary tumor virus.

[0448] The retroviral plasmid vector is employed to transduce packaging cell lines to form producer cell lines. Examples of packaging cells which may be transfected include, but are not limited to, the PE501, PA317, R-2, R-AM, PA12, T19-14X, VT-19-17-H2, RCRE, RCRIP, GP+E-86, GP+envAm12, and DAN cell lines as described in Miller, Human Gene Therapy 1:5-14 (1990), which is incorporated herein by reference in its entirety. The vector may transduce the packaging cells through any means known in the art. Such means include, but are not limited to, electroporation, the use of liposomes, and CaPO₄ precipitation. In one alternative, the retroviral plasmid vector may be encapsulated into a liposome, or coupled to a lipid, and then administered to a host.

[0449] The producer cell line generates infectious retroviral vector particles which include polynucleotide encoding a polypeptide of the present invention. Such retroviral vector particles then may be employed, to transduce eukaryotic cells, either in vitro or in vivo. The transduced eukaryotic cells will express a polypeptide of the present invention.

[0450] In certain other embodiments, cells are engineered, ex vivo or in vivo, with polynucleotide contained in an adenovirus vector. Adenovirus can be manipulated such that it encodes and expresses a polypeptide of the present invention, and at the same time is inactivated in terms of its ability to replicate in a normal lytic viral life cycle. Adenovirus expression is achieved without integration of the viral DNA into the host cell chromosome, thereby alleviating concerns about insertional mutagenesis. Furthermore, adenoviruses have been used as live enteric vaccines for many years with an excellent safety profile (Schwartz et al. Am. Rev. Respir. Dis.109:233-238 (1974)). Finally, adenovirus mediated gene transfer has been demonstrated in a number of instances including transfer of alpha-l-antitrypsin and CFTR to the lungs of cotton rats (Rosenfeld, M. A. et al. (1991) Science 252:431-434; Rosenfeld et al., (1992) Cell 68:143-155). Furthermore, extensive studies to attempt to establish adenovirus as a causative agent in human cancer were uniformly negative (Green, M. et al. (1979) Proc. Natl. Acad. Sci. USA 76:6606).

[0451] Suitable adenoviral vectors useful in the present invention are described, for example, in Kozarsky and Wilson, Curr. Opin. Genet. Devel. 3:499-503 (1993); Rosenfeld et al., Cell 68:143-155 (1992); Engelhardt et al., Human Genet. Ther. 4:759-769 (1993); Yang et al., Nature Genet. 7:362-369 (1994); Wilson et al., Nature 365:691-692 (1993); and U.S. Pat. No. 5,652,224, which are herein incorporated by reference. For example, the adenovirus vector Ad2 is useful and can be grown in human 293 cells. These cells contain the E1 region of adenovirus and constitutively express E1a and E1b, which complement the defective adenoviruses by providing the products of the genes deleted from the vector. In addition to Ad2, other varieties of adenovirus (e.g., Ad3, Ad5, and Ad7) are also useful in the present invention.

[0452] Preferably, the adenoviruses used in the present invention are replication deficient. Replication deficient adenoviruses require the aid of a helper virus and/or packaging cell line to form infectious particles. The resulting virus is capable of infecting cells and can express a polynucleotide of interest which is operably linked to a promoter, but cannot replicate in most cells. Replication deficient adenoviruses may be deleted in one or more of all or a portion of the following genes: E1a, E1b, E3, E4, E2a, or L1 through L5.

[0453] In certain other embodiments, the cells are engineered, ex vivo or in vivo, using an adeno-associated virus (AAV). AAVs are naturally occurring defective viruses that require helper viruses to produce infectious particles (Muzyczka, N., Curr. Topics in Microbiol. Immunol. 158:97 (1992)). It is also one of the few viruses that may integrate its DNA into non-dividing cells. Vectors containing as little as 300 base pairs of AAV can be packaged and can integrate, but space for exogenous DNA is limited to about 4.5 kb. Methods for producing and using such AAVs are known in the art. See, for example, U.S. Pat. Nos. 5,139,941, 5,173,414, 5,354,678, 5,436,146, 5,474,935, 5,478,745, and 5,589,377.

[0454] For example, an appropriate AAV vector for use in the present invention will include all the sequences necessary for DNA replication, encapsidation, and host-cell integration. The polynucleotide construct is inserted into the AAV vector using standard cloning methods, such as those found in Sambrook et al., Molecular Cloning: A Laboratory Manual, Cold Spring Harbor Press (1989). The recombinant AAV vector is then transfected into packaging cells which are infected with a helper virus, using any standard technique, including lipofection, electroporation, calcium phosphate precipitation, etc. Appropriate helper viruses include adenoviruses, cytomegaloviruses, vaccinia viruses, or herpes viruses. Once the packaging cells are transfected and infected, they will produce infectious AAV viral particles which contain the polynucleotide construct. These viral particles are then used to transduce eukaryotic cells, either ex vivo or in vivo. The transduced cells will contain the polynucleotide construct integrated into its genome, and will express a polypeptide of the invention.

[0455] Another method of gene therapy involves operably associating heterologous control regions and endogenous polynucleotide sequences (e.g. encoding a polypeptide of the present invention) via homologous recombination (see, e.g., U.S. Pat. No. 5,641,670, issued Jun. 24, 1997; International Publication No. WO 96/29411, published Sep. 26, 1996; International Publication No. WO 94/12650, published Aug. 4, 1994; Koller et al., Proc. Natl. Acad. Sci. USA 86:8932-8935 (1989); and Zijlstra et al., Nature 342:435-438 (1989), which are herein encorporated by reference. This method involves the activation of a gene which is present in the target cells, but which is not normally expressed in the cells, or is expressed at a lower level than desired.

[0456] Polynucleotide constructs are made, using standard techniques known in the art, which contain the promoter with targeting sequences flanking the promoter. Suitable promoters are described herein. The targeting sequence is sufficiently complementary to an endogenous sequence to permit homologous recombination of the promoter-targeting sequence with the endogenous sequence. The targeting sequence will be sufficiently near the 5′ end of the desired endogenous polynucleotide sequence so the promoter will be operably linked to the endogenous sequence upon homologous recombination.

[0457] The promoter and the targeting sequences can be amplified using PCR. Preferably, the amplified promoter contains distinct restriction enzyme sites on the 5′ and 3′ ends. Preferably, the 3′ end of the first targeting sequence contains the same restriction enzyme site as the 5′ end of the amplified promoter and the 5′ end of the second targeting sequence contains the same restriction site as the 3′ end of the amplified promoter. The amplified promoter and targeting sequences are digested and ligated together.

[0458] The promoter-targeting sequence construct is delivered to the cells, either as naked polynucleotide, or in conjunction with transfection-facilitating agents, such as liposomes, viral sequences, viral particles, whole viruses, lipofection, precipitating agents, etc., described in more detail above. The P promoter-targeting sequence can be delivered by any method, included direct needle injection, intravenous injection, topical administration, catheter infusion, particle accelerators, etc. The methods are described in more detail below.

[0459] The promoter-targeting sequence construct is taken up by cells. Homologous recombination between the construct and the endogenous sequence takes place, such that an endogenous sequence is placed under the control of the promoter. The promoter then drives the expression of the endogenous sequence.

[0460] The polynucleotide encoding a polypeptide of the present invention may contain a secretory signal sequence that facilitates secretion of the protein. Typically, the signal sequence is positioned in the coding region of the polynucleotide to be expressed towards or at the 5′ end of the coding region. The signal sequence may be homologous or heterologous to the polynucleotide of interest and may be homologous or heterologous to the cells to be transfected. Additionally, the signal sequence may be chemically synthesized using methods known in the art.

[0461] Any mode of administration of any of the above-described polynucleotides constructs can be used so long as the mode results in the expression of one or more molecules in an amount sufficient to provide a therapeutic effect. This includes direct needle injection, systemic injection, catheter infusion, biolistic injectors, particle accelerators (i.e., “gene guns”), gelfoam sponge depots, other commercially available depot materials, osmotic pumps (e.g., Aiza minipumps), oral or suppositorial solid (tablet or pill) pharmaceutical formulations, and decanting or topical applications during surgery. For example, direct injection of naked calcium phosphate-precipitated plasmid into rat liver and rat spleen or a protein-coated plasmid into the portal vein has resulted in gene expression of the foreign gene in the rat livers (Kaneda et al., Science 243:375 (1989)).

[0462] A preferred method of local administration is by direct injection. Preferably, a recombinant molecule of the present invention complexed with a delivery vehicle is administered by direct injection into or locally within the area of arteries. Administration of a composition locally within the area of arteries refers to injecting the composition centimeters and preferably, millimeters within arteries.

[0463] Another method of local administration is to contact a polynucleotide construct of the present invention in or around a surgical wound. For example, a patient can undergo surgery and the polynucleotide construct can be coated on the surface of tissue inside the wound or the construct can be injected into areas of tissue inside the wound.

[0464] Therapeutic compositions useful in systemic administration, include recombinant molecules of the present invention complexed to a targeted delivery vehicle of the present invention. Suitable delivery vehicles for use with systemic administration comprise liposomes comprising ligands for targeting the vehicle to a particular site. In specific embodiments, suitable delivery vehicles for use with systemic administration comprise liposomes comprising polypeptides of the invention for targeting the vehicle to a particular site.

[0465] Preferred methods of systemic administration, include intravenous injection, aerosol, oral and percutaneous (topical) delivery. Intravenous injections can be performed using methods standard in the art. Aerosol delivery can also be performed using methods standard in the art (see, for example, Stribling et al., Proc. Natl. Acad. Sci. USA 189:11277-11281, 1992, which is incorporated herein by reference). Oral delivery can be performed by complexing a polynucleotide construct of the present invention to a carrier capable of withstanding degradation by digestive enzymes in the gut of an animal. Examples of such carriers, include plastic capsules or tablets, such as those known in the art. Topical delivery can be performed by mixing a polynucleotide construct of the present invention with a lipophilic reagent (e.g., DMSO) that is capable of passing into the skin.

[0466] Determining an effective amount of substance to be delivered can depend upon a number of factors including, for example, the chemical structure and biological activity of the substance, the age and weight of the animal, the precise condition requiring treatment and its severity, and the route of administration. The frequency of treatments depends upon a number of factors, such as the amount of polynucleotide constructs administered per dose, as well as the health and history of the subject. The precise amount, number of doses, and timing of doses will be determined by the attending physician or veterinarian.

[0467] Therapeutic compositions of the present invention can be administered to any animal, preferably to mammals and birds. Preferred mammals include humans, dogs, cats, mice, rats, rabbits sheep, cattle, horses and pigs, with humans being particularly preferred.

[0468] Biological Activities

[0469] Polynucleotides or polypeptides, or agonists or antagonists of the present invention, can be used in assays to test for one or more biological activities. If these polynucleotides or polypeptides, or agonists or antagonists of the present invention, do exhibit activity in a particular assay, it is likely that these molecules may be involved in the diseases associated with the biological activity. Thus, the polynucleotides and polypeptides, and agonists or antagonists could be used to diagnose, prognose, prevent and/or treat the associated disease.

[0470] Members of the immunoglobulin superfamily of proteins are believed to be involved in biological activities associated with protein-protein interaction, cell adhesion, and signal transduction. Accordingly, compositions of the invention (including polynucleotides, polypeptides and antibodies of the invention, and fragments and variants thereof) may be used in the diagnosis, prognosis, prevention and/or treatment of diseases and/or disorders associated with aberrant immunoglobulin superfamily activity.

[0471] In preferred embodiments, compositions of the invention (including polynucleotides, polypeptides and antibodies of the invention, and fragments and variants thereof) may be used in the diagnosis, prognosis, prevention and/or treatment of diseases and/or disorders relating to neural disorders disorders (e.g., as described under “Neurological Diseases” below) and Immune system disorders (e.g., as described under “Immune Activity” below).

[0472] In certain embodiments, a polypeptide of the invention, or polynucleotides, antibodies, agonists, or antagonists corresponding to that polypeptide, may be used to diagnose and/or prognose diseases and/or disorders associated with the tissue(s) in which the polypeptide of the invention is expressed, including one, two, three, four, five, or more of the tissues disclosed in Table 1A, column 8 (Tissue Distribution Library Code).

[0473] Thus, polynucleotides, translation products and antibodies of the invention are useful in the diagnosis, prognosis, prevention and/or treatment of diseases and/or disorders associated with activities that include, but are not limited to, signal transduction, protein-protein interaction, cell adhesion, and neurological disorders.

[0474] More generally, polynucleotides, translation products and antibodies corresponding to this gene may be useful for the diagnosis, prognosis, prevention and/or treatment of diseases and/or disorders associated with the following systems.

[0475] Immune Activity

[0476] Polynucleotides, polypeptides, antibodies, and/or agonists or antagonists of the present invention may be useful in treating, preventing, diagnosing and/or prognosing diseases, disorders, and/or conditions of the immune system, by, for example, activating or inhibiting the proliferation, differentiation, or mobilization (chemotaxis) of immune cells. Immune cells develop through a process called hematopoiesis, producing myeloid (platelets, red blood cells, neutrophils, and macrophages) and lymphoid (B and T lymphocytes) cells from pluripotent stem cells. The etiology of these immune diseases, disorders, and/or conditions may be genetic, somatic, such as cancer and some autoimmune diseases, acquired (e.g., by chemotherapy or toxins), or infectious. Moreover, polynucleotides, polypeptides, antibodies, and/or agonists or antagonists of the present invention can be used as a marker or detector of a particular immune system disease or disorder.

[0477] In another embodiment, a polypeptide of the invention, or polynucleotides, antibodies, agonists, or antagonists corresponding to that polypeptide, may be used to treat diseases and disorders of the immune system and/or to inhibit or enhance an immune response generated by cells associated with the tissue(s) in which the polypeptide of the invention is expressed, including one, two, three, four, five, or more tissues disclosed in Table 1A, column 8 (Tissue Distribution Library Code).

[0478] Polynucleotides, polypeptides, antibodies, and/or agonists or antagonists of the present invention may be useful in treating, preventing, diagnosing, and/or prognosing immunodeficiencies, including both congenital and acquired immunodeficiencies. Examples of B cell immunodeficiencies in which immunoglobulin levels B cell function and/or B cell numbers are decreased include: X-linked agammaglobulinemia (Bruton's disease), X-linked infantile agammaglobulinemia, X-linked immunodeficiency with hyper IgM, non X-linked immunodeficiency with hyper IgM, X-linked lymphoproliferative syndrome (XLP), agammaglobulinemia including congenital and acquired agammaglobulinemia, adult onset agammaglobulinemia, late-onset agammaglobulinemia, dysgammaglobulinemia, hypogammaglobulinemia, unspecified hypogammaglobulinemia, recessive agammaglobulinemia (Swiss type), Selective IgM deficiency, selective IgA deficiency, selective IgG subclass deficiencies, IgG subclass deficiency (with or without IgA deficiency), Ig deficiency with increased IgM, IgG and IgA deficiency with increased IgM, antibody deficiency with normal or elevated Igs, Ig heavy chain deletions, kappa chain deficiency, B cell lymphoproliferative disorder (BLPD), common variable immunodeficiency (CVID), common variable immunodeficiency (CVI) (acquired), and transient hypogammaglobulinemia of infancy.

[0479] In specific embodiments, ataxia-telangiectasia or conditions associated with ataxia-telangiectasia are treated, prevented, diagnosed, and/or prognosing using the polypeptides or polynucleotides of the invention, and/or agonists or antagonists thereof.

[0480] Examples of congenital immunodeficiencies in which T cell and/or B cell function and/or number is decreased include, but are not limited to: DiGeorge anomaly, severe combined immunodeficiencies (SCID) (including, but not limited to, X-linked SCID, autosomal recessive SCID, adenosine deaminase deficiency, purine nucleoside phosphorylase (PNP) deficiency, Class II MHC deficiency (Bare lymphocyte syndrome), Wiskott-Aldrich syndrome, and ataxia telangiectasia), thymic hypoplasia, third and fourth pharyngeal pouch syndrome, 22q11.2 deletion, chronic mucocutaneous candidiasis, natural killer cell deficiency (NK), idiopathic CD4+T-lymphocytopenia, immunodeficiency with predominant T cell defect (unspecified), and unspecified immunodeficiency of cell mediated immunity.

[0481] In specific embodiments, DiGeorge anomaly or conditions associated with DiGeorge anomaly are treated, prevented, diagnosed, and/or prognosed using polypeptides or polynucleotides of the invention, or antagonists or agonists thereof.

[0482] Other immunodeficiencies that may be treated, prevented, diagnosed, and/or prognosed using polypeptides or polynucleotides of the invention, and/or agonists or antagonists thereof, include, but are not limited to, chronic granulomatous disease, Chediak-Higashi syndrome, myeloperoxidase deficiency, leukocyte glucose-6-phosphate dehydrogenase deficiency, X-linked lymphoproliferative syndrome (XLP), leukocyte adhesion deficiency, complement component deficiencies (including C1, C2, C3, C4, C5, C6, C7, C8 and/or C9 deficiencies), reticular dysgenesis, thymic alymphoplasia-aplasia, immunodeficiency with thymoma, severe congenital leukopenia, dysplasia with immunodeficiency, neonatal neutropenia, short limbed dwarfism, and Nezelof syndrome-combined immunodeficiency with Igs.

[0483] In a preferred embodiment, the immunodeficiencies and/or conditions associated with the immunodeficiencies recited above are treated, prevented, diagnosed and/or prognosed using polynucleotides, polypeptides, antibodies, and/or agonists or antagonists of the present invention.

[0484] In a preferred embodiment polynucleotides, polypeptides, antibodies, and/or agonists or antagonists of the present invention could be used as an agent to boost immunoresponsiveness among immunodeficient individuals. In specific embodiments, polynucleotides, polypeptides, antibodies, and/or agonists or antagonists of the present invention could be used as an agent to boost immunoresponsiveness among B cell and/or T cell immunodeficient individuals.

[0485] The polynucleotides, polypeptides, antibodies, and/or agonists or antagonists of the present invention may be useful in treating, preventing, diagnosing and/or prognosing autoimmune disorders. Many autoimmune disorders result from inappropriate recognition of self as foreign material by immune cells. This inappropriate recognition results in an immune response leading to the destruction of the host tissue. Therefore, the administration of polynucleotides and polypeptides of the invention that can inhibit an immune response, particularly the proliferation, differentiation, or chemotaxis of T-cells, may be an effective therapy in preventing autoimmune disorders.

[0486] Autoimmune diseases or disorders that may be treated, prevented, diagnosed and/or prognosed by polynucleotides, polypeptides, antibodies, and/or agonists or antagonists of the present invention include, but are not limited to, one or more of the following: systemic lupus erythematosus, rheumatoid arthritis, ankylosing spondylitis, multiple sclerosis, autoimmune thyroiditis, Hashimoto's thyroiditis, autoimmune hemolytic anemia, hemolytic anemia, thrombocytopenia, autoimmune thrombocytopenia purpura, autoimmune neonatal thrombocytopenia, idiopathic thrombocytopenia purpura, purpura (e.g., Henloch-Scoenlein purpura), autoimmunocytopenia, Goodpasture's syndrome, Pemphigus vulgaris, myasthenia gravis, Grave's disease (hyperthyroidism), and insulin-resistant diabetes mellitus.

[0487] Additional disorders that are likely to have an autoimmune component that may be treated, prevented, and/or diagnosed with the compositions of the invention include, but are not limited to, type II collagen-induced arthritis, antiphospholipid syndrome, dermatitis, allergic encephalomyelitis, myocarditis, relapsing polychondritis, rheumatic heart disease, neuritis, uveitis ophthalmia, polyendocrinopathies, Reiter's Disease, Stiff-Man Syndrome, autoimmune pulmonary inflammation, autism, Guillain-Barre Syndrome, insulin dependent diabetes mellitus, and autoimmune inflammatory eye disorders.

[0488] Additional disorders that are likely to have an autoimmune component that may be treated, prevented, diagnosed and/or prognosed with the compositions of the invention include, but are not limited to, scleroderma with anti-collagen antibodies (often characterized, e.g., by nucleolar and other nuclear antibodies), mixed connective tissue disease (often characterized, e.g., by antibodies to extractable nuclear antigens (e.g., ribonucleoprotein)), polymyositis (often characterized, e.g., by nonhistone ANA), pernicious anemia (often characterized, e.g., by antiparietal cell, microsomes, and intrinsic factor antibodies), idiopathic Addison's disease (often characterized, e.g., by humoral and cell-mediated adrenal cytotoxicity, infertility (often characterized, e.g., by antispermatozoal antibodies), glomerulonephritis (often characterized, e.g., by glomerular basement membrane antibodies or immune complexes), bullous pemphigoid (often characterized, e.g., by IgG and complement in basement membrane), Sjogren's syndrome (often characterized, e.g., by multiple tissue antibodies, and/or a specific nonhistone ANA (SS-B)), diabetes mellitus (often characterized, e.g., by cell-mediated and humoral islet cell antibodies), and adrenergic drug resistance (including adrenergic drug resistance with asthma or cystic fibrosis) (often characterized, e.g., by beta-adrenergic receptor antibodies).

[0489] Additional disorders that may have an autoimmune component that may be treated, prevented, diagnosed and/or prognosed with the compositions of the invention include, but are not limited to, chronic active hepatitis (often characterized, e.g., by smooth muscle antibodies), primary biliary cirrhosis (often characterized, e.g., by mitochondria antibodies), other endocrine gland failure (often characterized, e.g., by specific tissue antibodies in some cases), vitiligo (often characterized, e.g., by melanocyte antibodies), vasculitis (often characterized, e.g., by Ig and complement in vessel walls and/or low serum complement), post-MI (often characterized, e.g., by myocardial antibodies), cardiotomy syndrome (often characterized, e.g., by myocardial antibodies), urticaria (often characterized, e.g., by IgG and IgM antibodies to IgE), atopic dermatitis (often characterized, e.g., by IgG and IgM antibodies to IgE), asthma (often characterized, e.g., by IgG and IgM antibodies to IgE), and many other inflammatory, granulomatous, degenerative, and atrophic disorders.

[0490] In a preferred embodiment, the autoimmune diseases and disorders and/or conditions associated with the diseases and disorders recited above are treated, prevented, diagnosed and/or prognosed using for example, antagonists or agonists, polypeptides or polynucleotides, or antibodies of the present invention. In a specific preferred embodiment, rheumatoid arthritis is treated, prevented, and/or diagnosed using polynucleotides, polypeptides, antibodies, and/or agonists or antagonists of the present invention.

[0491] In another specific preferred embodiment, systemic lupus erythematosus is treated, prevented, and/or diagnosed using polynucleotides, polypeptides, antibodies, and/or agonists or antagonists of the present invention. In another specific preferred embodiment, idiopathic thrombocytopenia purpura is treated, prevented, and/or diagnosed using polynucleotides, polypeptides, antibodies, and/or agonists or antagonists of the present invention.

[0492] In another specific preferred embodiment IgA nephropathy is treated, prevented, and/or diagnosed using polynucleotides, polypeptides, antibodies, and/or agonists or antagonists of the present invention.

[0493] In a preferred embodiment, the autoimmune diseases and disorders and/or conditions associated with the diseases and disorders recited above are treated, prevented, diagnosed and/or prognosed using polynucleotides, polypeptides, antibodies, and/or agonists or antagonists of the present invention

[0494] In preferred embodiments, polypeptides, antibodies, polynucleotides and/or agonists or antagonists of the present invention are used as a immunosuppressive agent(s).

[0495] Polynucleotides, polypeptides, antibodies, and/or agonists or antagonists of the present invention may be useful in treating, preventing, prognosing, and/or diagnosing diseases, disorders, and/or conditions of hematopoietic cells. Polynucleotides, polypeptides, antibodies, and/or agonists or antagonists of the present invention could be used to increase differentiation and proliferation of hematopoietic cells, including the pluripotent stem cells, in an effort to treat or prevent those diseases, disorders, and/or conditions associated with a decrease in certain (or many) types hematopoietic cells, including but not limited to, leukopenia, neutropenia, anemia, and thrombocytopenia. Alternatively, Polynucleotides, polypeptides, antibodies, and/or agonists or antagonists of the present invention could be used to increase differentiation and proliferation of hematopoietic cells, including the pluripotent stem cells, in an effort to treat or prevent those diseases, disorders, and/or conditions associated with an increase in certain (or many) types of hematopoietic cells, including but not limited to, histiocytosis.

[0496] Allergic reactions and conditions, such as asthma (particularly allergic asthma) or other respiratory problems, may also be treated, prevented, diagnosed and/or prognosed using polypeptides, antibodies, or polynucleotides of the invention, and/or agonists or antagonists thereof. Moreover, these molecules can be used to treat, prevent, prognose, and/or diagnose anaphylaxis, hypersensitivity to an antigenic molecule, or blood group incompatibility.

[0497] Additionally, polypeptides or polynucleotides of the invention, and/or agonists or antagonists thereof, may be used to treat, prevent, diagnose and/or prognose IgE-mediated allergic reactions. Such allergic reactions include, but are not limited to, asthma, rhinitis, and eczema. In specific embodiments, polynucleotides, polypeptides, antibodies, and/or agonists or antagonists of the present invention may be used to modulate IgE concentrations in vitro or in vivo.

[0498] Moreover, polynucleotides, polypeptides, antibodies, and/or agonists or antagonists of the present invention have uses in the diagnosis, prognosis, prevention, and/or treatment of inflammatory conditions. For example, since polypeptides, antibodies, or polynucleotides of the invention, and/or agonists or antagonists of the invention may inhibit the activation, proliferation and/or differentiation of cells involved in an inflammatory response, these molecules can be used to prevent and/or treat chronic and acute inflammatory conditions. Such inflammatory conditions include, but are not limited to, for example, inflammation associated with infection (e.g., septic shock, sepsis, or systemic inflammatory response syndrome), ischemia-reperfusion injury, endotoxin lethality, complement-mediated hyperacute rejection, nephritis, cytokine or chemokine induced lung injury, inflammatory bowel disease, Crohn's disease, over production of cytokines (e.g., TNF or IL-1.), respiratory disorders (e.g., asthma and allergy); gastrointestinal disorders (e.g., inflammatory bowel disease); cancers (e.g., gastric, ovarian, lung, bladder, liver, and breast); CNS disorders (e.g., multiple sclerosis; ischemic brain injury and/or stroke, traumatic brain injury, neurodegenerative disorders (e.g., Parkinson's disease and Alzheimer's disease); AIDS-related dementia; and prion disease); cardiovascular disorders (e.g., atherosclerosis, myocarditis, cardiovascular disease, and cardiopulmonary bypass complications); as well as many additional diseases, conditions, and disorders that are characterized by inflammation (e.g., hepatitis, rheumatoid arthritis, gout, trauma, pancreatitis, sarcoidosis, dermatitis, renal ischemia-reperfusion injury, Grave's disease, systemic lupus erythematosus, diabetes mellitus, and allogenic transplant rejection).

[0499] Because inflammation is a fundamental defense mechanism, inflammatory disorders can effect virtually any tissue of the body. Accordingly, polynucleotides, polypeptides, and antibodies of the invention, as well as agonists or antagonists thereof, have uses in the treatment of tissue-specific inflammatory disorders, including, but not limited to, adrenalitis, alveolitis, angiocholecystitis, appendicitis, balanitis, blepharitis, bronchitis, bursitis, carditis, cellulitis, cervicitis, cholecystitis, chorditis, cochlitis, colitis, conjunctivitis, cystitis, dermatitis, diverticulitis, encephalitis, endocarditis, esophagitis, eustachitis, fibrositis, folliculitis, gastritis, gastroenteritis, gingivitis, glossitis, hepatosplenitis, keratitis, labyrinthitis, laryngitis, lymphangitis, mastitis, media otitis, meningitis, metritis, mucitis, myocarditis, myosititis, myringitis, nephritis, neuritis, orchitis, osteochondritis, otitis, pericarditis, peritendonitis, peritonitis, pharyngitis, phlebitis, poliomyelitis, prostatitis, pulpitis, retinitis, rhinitis, salpingitis, scleritis, sclerochoroiditis, scrotitis, sinusitis, spondylitis, steatitis, stomatitis, synovitis, syringitis, tendonitis, tonsillitis, urethritis, and vaginitis.

[0500] In specific embodiments, polypeptides, antibodies, or polynucleotides of the invention, and/or agonists or antagonists thereof, are useful to diagnose, prognose, prevent, and/or treat organ transplant rejections and graft-versus-host disease. Organ rejection occurs by host immune cell destruction of the transplanted tissue through an immune response. Similarly, an immune response is also involved in GVHD, but, in this case, the foreign transplanted immune cells destroy the host tissues. Polypeptides, antibodies, or polynucleotides of the invention, and/or agonists or antagonists thereof, that inhibit an immune response, particularly the activation, proliferation, differentiation, or chemotaxis of T-cells, may be an effective therapy in preventing organ rejection or GVHD. In specific embodiments, polypeptides, antibodies, or polynucleotides of the invention, and/or agonists or antagonists thereof, that inhibit an immune response, particularly the activation, proliferation, differentiation, or chemotaxis of T-cells, may be an effective therapy in preventing experimental allergic and hyperacute xenograft rejection.

[0501] In other embodiments, polypeptides, antibodies, or polynucleotides of the invention, and/or agonists or antagonists thereof, are useful to diagnose, prognose, prevent, and/or treat immune complex diseases, including, but not limited to, serum sickness, post streptococcal glomerulonephritis, polyarteritis nodosa, and immune complex-induced vasculitis.

[0502] Polypeptides, antibodies, polynucleotides and/or agonists or antagonists of the invention can be used to treat, detect, and/or prevent infectious agents. For example, by increasing the immune response, particularly increasing the proliferation activation and/or differentiation of B and/or T cells, infectious diseases may be treated, detected, and/or prevented. The immune response may be increased by either enhancing an existing immune response, or by initiating a new immune response. Alternatively, polynucleotides, polypeptides, antibodies, and/or agonists or antagonists of the present invention may also directly inhibit the infectious agent (refer to section of application listing infectious agents, etc), without necessarily eliciting an immune response.

[0503] In another embodiment, polypeptides, antibodies, polynucleotides and/or agonists or antagonists of the present invention are used as a vaccine adjuvant that enhances immune responsiveness to an antigen. In a specific embodiment, polypeptides, antibodies, polynucleotides and/or agonists or antagonists of the present invention are used as an adjuvant to enhance tumor-specific immune responses.

[0504] In another specific embodiment, polypeptides, antibodies, polynucleotides and/or agonists or antagonists of the present invention are used as an adjuvant to enhance anti-viral immune responses. Anti-viral immune responses that may be enhanced using the compositions of the invention as an adjuvant, include virus and virus associated diseases or symptoms described herein or otherwise known in the art. In specific embodiments, the compositions of the invention are used as an adjuvant to enhance an immune response to a virus, disease, or symptom selected from the group consisting of: AIDS, meningitis, Dengue, EBV, and hepatitis (e.g., hepatitis B). In another specific embodiment, the compositions of the invention are used as an adjuvant to enhance an immune response to a virus, disease, or symptom selected from the group consisting of: HIV/AIDS, respiratory syncytial virus, Dengue, rotavirus, Japanese B encephalitis, influenza A and B, parainfluenza, measles, cytomegalovirus, rabies, Junin, Chikungunya, Rift Valley Fever, herpes simplex, and yellow fever.

[0505] In another specific embodiment, polypeptides, antibodies, polynucleotides and/or agonists or antagonists of the present invention are used as an adjuvant to enhance anti-bacterial or anti-fungal immune responses. Anti-bacterial or anti-fungal immune responses that may be enhanced using the compositions of the invention as an adjuvant, include bacteria or fungus and bacteria or fungus associated diseases or symptoms described herein or otherwise known in the art. In specific embodiments, the compositions of the invention are used as an adjuvant to enhance an immune response to a bacteria or fungus, disease, or symptom selected from the group consisting of: tetanus, Diphtheria, botulism, and meningitis type B.

[0506] In another specific embodiment, the compositions of the invention are used as an adjuvant to enhance an immune response to a bacteria or fungus, disease, or symptom selected from the group consisting of: Vibrio cholerae, Mycobacterium leprae, Salmonella typhi, Salmonella paratyphi, Meisseria meningitidis, Streptococcus pneumoniae, Group B streptococcus, Shigella spp., Enterotoxigenic Escherichia coli, Enterohemorrhagic E. coli, and Borrelia burgdorferi.

[0507] In another specific embodiment, polypeptides, antibodies, polynucleotides and/or agonists or antagonists of the present invention are used as an adjuvant to enhance anti-parasitic immune responses. Anti-parasitic immune responses that may be enhanced using the compositions of the invention as an adjuvant, include parasite and parasite associated diseases or symptoms described herein or otherwise known in the art. In specific embodiments, the compositions of the invention are used as an adjuvant to enhance an immune response to a parasite. In another specific embodiment, the compositions of the invention are used as an adjuvant to enhance an immune response to Plasmodium (malaria) or Leishmania.

[0508] In another specific embodiment, polypeptides, antibodies, polynucleotides and/or agonists or antagonists of the present invention may also be employed to treat infectious diseases including silicosis, sarcoidosis, and idiopathic pulmonary fibrosis; for example, by preventing the recruitment and activation of mononuclear phagocytes.

[0509] In another specific embodiment, polypeptides, antibodies, polynucleotides and/or agonists or antagonists of the present invention are used as an antigen for the generation of antibodies to inhibit or enhance immune mediated responses against polypeptides of the invention.

[0510] In one embodiment, polypeptides, antibodies, polynucleotides and/or agonists or antagonists of the present invention are administered to an animal (e.g., mouse, rat, rabbit, hamster, guinea pig, pigs, micro-pig, chicken, camel, goat, horse, cow, sheep, dog, cat, non-human primate, and human, most preferably human) to boost the immune system, to produce increased quantities of one or more antibodies (e.g., IgG, IgA, IgM, and IgE), to induce higher affinity antibody production and immunoglobulin class switching (e.g., IgG, IgA, IgM, and IgE), and/or to increase an immune response.

[0511] In another specific embodiment, polypeptides, antibodies, polynucleotides and/or agonists or antagonists of the present invention are used as a stimulator of B cell responsiveness to pathogens.

[0512] In another specific embodiment, polypeptides, antibodies, polynucleotides and/or agonists or antagonists of the present invention are used as an activator of T cells.

[0513] In another specific embodiment, polypeptides, antibodies, polynucleotides and/or agonists or antagonists of the present invention are used as an agent that elevates the immune status of an individual prior to their receipt of immunosuppressive therapies.

[0514] In another specific embodiment, polypeptides, antibodies, polynucleotides and/or agonists or antagonists of the present invention are used as an agent to induce higher affinity antibodies.

[0515] In another specific embodiment, polypeptides, antibodies, polynucleotides and/or agonists or antagonists of the present invention are used as an agent to increase serum immunoglobulin concentrations.

[0516] In another specific embodiment, polypeptides, antibodies, polynucleotides and/or agonists or antagonists of the present invention are used as an agent to accelerate recovery of immunocompromised individuals.

[0517] In another specific embodiment, polypeptides, antibodies, polynucleotides and/or agonists or antagonists of the present invention are used as an agent to boost immunoresponsiveness among aged populations and/or neonates.

[0518] In another specific embodiment, polypeptides, antibodies, polynucleotides and/or agonists or antagonists of the present invention are used as an immune system enhancer prior to, during, or after bone marrow transplant and/or other transplants (e.g., allogeneic or xenogeneic organ transplantation). With respect to transplantation, compositions of the invention may be administered prior to, concomitant with, and/or after transplantation. In a specific embodiment, compositions of the invention are administered after transplantation, prior to the beginning of recovery of T-cell populations. In another specific embodiment, compositions of the invention are first administered after transplantation after the beginning of recovery of T cell populations, but prior to full recovery of B cell populations.

[0519] In another specific embodiment, polypeptides, antibodies, polynucleotides and/or agonists or antagonists of the present invention are used as an agent to boost immunoresponsiveness among individuals having an acquired loss of B cell function. Conditions resulting in an acquired loss of B cell function that may be ameliorated or treated by administering the polypeptides, antibodies, polynucleotides and/or agonists or antagonists thereof, include, but are not limited to, HIV Infection, AIDS, bone marrow transplant, and B cell chronic lymphocytic leukemia (CLL).

[0520] In another specific embodiment, polypeptides, antibodies, polynucleotides and/or agonists or antagonists of the present invention are used as an agent to boost immunoresponsiveness among individuals having a temporary immune deficiency. Conditions resulting in a temporary immune deficiency that may be ameliorated or treated by administering the polypeptides, antibodies, polynucleotides and/or agonists or antagonists thereof, include, but are not limited to, recovery from viral infections (e.g., influenza), conditions associated with malnutrition, recovery from infectious mononucleosis, or conditions associated with stress, recovery from measles, recovery from blood transfusion, and recovery from surgery.

[0521] In another specific embodiment, polypeptides, antibodies, polynucleotides and/or agonists or antagonists of the present invention are used as a regulator of antigen presentation by monocytes, dendritic cells, and/or B-cells. In one embodiment, polynucleotides, polypeptides, antibodies, and/or agonists or antagonists of the present invention enhance antigen presentation or antagonizes antigen presentation in vitro or in vivo. Moreover, in related embodiments, said enhancement or antagonism of antigen presentation may be useful as an anti-tumor treatment or to modulate the immune system.

[0522] In another specific embodiment, polypeptides, antibodies, polynucleotides and/or agonists or antagonists of the present invention are used as an agent to direct an individual's immune system towards development of a humoral response (i.e. TH2) as opposed to a TH1 cellular response.

[0523] In another specific embodiment, polypeptides, antibodies, polynucleotides and/or agonists or antagonists of the present invention are used as a means to induce tumor proliferation and thus make it more susceptible to anti-neoplastic agents. For example, multiple myeloma is a slowly dividing disease and is thus refractory to virtually all anti-neoplastic regimens. If these cells were forced to proliferate more rapidly their susceptibility profile would likely change.

[0524] In another specific embodiment, polypeptides, antibodies, polynucleotides and/or agonists or antagonists of the present invention are used as a stimulator of B cell production in pathologies such as AIDS, chronic lymphocyte disorder and/or Common Variable Immunodificiency.

[0525] In another specific embodiment, polypeptides, antibodies, polynucleotides and/or agonists or antagonists of the present invention are used as a therapy for generation and/or regeneration of lymphoid tissues following surgery, trauma or genetic defect. In another specific embodiment, polypeptides, antibodies, polynucleotides and/or agonists or antagonists of the present invention are used in the pretreatment of bone marrow samples prior to transplant.

[0526] In another specific embodiment, polypeptides, antibodies, polynucleotides and/or agonists or antagonists of the present invention are used as a gene-based therapy for genetically inherited disorders resulting in immuno-incompetence/immunodeficiency such as observed among SCID patients.

[0527] In another specific embodiment, polypeptides, antibodies, polynucleotides and/or agonists or antagonists of the present invention are used as a means of activating monocytes/macrophages to defend against parasitic diseases that effect monocytes such as Leishmania.

[0528] In another specific embodiment, polypeptides, antibodies, polynucleotides and/or agonists or antagonists of the present invention are used as a means of regulating secreted cytokines that are elicited by polypeptides of the invention.

[0529] In another embodiment, polypeptides, antibodies, polynucleotides and/or agonists or antagonists of the present invention are used in one or more of the applications decribed herein, as they may apply to veterinary medicine.

[0530] In another specific embodiment, polypeptides, antibodies, polynucleotides and/or agonists or antagonists of the present invention are used as a means of blocking various aspects of immune responses to foreign agents or self. Examples of diseases or conditions in which blocking of certain aspects of immune responses may be desired include autoimmune disorders such as lupus, and arthritis, as well as immunoresponsiveness to skin allergies, inflammation, bowel disease, injury and diseases/disorders associated with pathogens.

[0531] In another specific embodiment, polypeptides, antibodies, polynucleotides and/or agonists or antagonists of the present invention are used as a therapy for preventing the B cell proliferation and Ig secretion associated with autoimmune diseases such as idiopathic thrombocytopenic purpura, systemic lupus erythematosus and multiple sclerosis.

[0532] In another specific embodiment, polypeptides, antibodies, polynucleotides and/or agonists or antagonists of the present invention are used as a inhibitor of B and/or T cell migration in endothelial cells. This activity disrupts tissue architecture or cognate responses and is useful, for example in disrupting immune responses, and blocking sepsis.

[0533] In another specific embodiment, polypeptides, antibodies, polynucleotides and/or agonists or antagonists of the present invention are used as a therapy for chronic hypergammaglobulinemia evident in such diseases as monoclonal gammopathy of undetermined significance (MGUS), Waldenstrom's disease, related idiopathic monoclonal gammopathies, and plasmacytomas.

[0534] In another specific embodiment, polypeptides, antibodies, polynucleotides and/or agonists or antagonists of the present invention may be employed for instance to inhibit polypeptide chemotaxis and activation of macrophages and their precursors, and of neutrophils, basophils, B lymphocytes and some T-cell subsets, e.g., activated and CD8 cytotoxic T cells and natural killer cells, in certain autoimmune and chronic inflammatory and infective diseases. Examples of autoimmune diseases are described herein and include multiple sclerosis, and insulin-dependent diabetes.

[0535] The polypeptides, antibodies, polynucleotides and/or agonists or antagonists of the present invention may also be employed to treat idiopathic hyper-eosinophilic syndrome by, for example, preventing eosinophil production and migration.

[0536] In another specific embodiment, polypeptides, antibodies, polynucleotides and/or agonists or antagonists of the present invention are used to enhance or inhibit complement mediated cell lysis.

[0537] In another specific embodiment, polypeptides, antibodies, polynucleotides and/or agonists or antagonists of the present invention are used to enhance or inhibit antibody dependent cellular cytotoxicity.

[0538] In another specific embodiment, polypeptides, antibodies, polynucleotides and/or agonists or antagonists of the present invention may also be employed for treating atherosclerosis, for example, by preventing monocyte infiltration in the artery wall.

[0539] In another specific embodiment, polypeptides, antibodies, polynucleotides and/or agonists or antagonists of the present invention may be employed to treat adult respiratory distress syndrome (ARDS).

[0540] In another specific embodiment, polypeptides, antibodies, polynucleotides and/or agonists or antagonists of the present invention may be useful for stimulating wound and tissue repair, stimulating angiogenesis, and/or stimulating the repair of vascular or lymphatic diseases or disorders. Additionally, agonists and antagonists of the invention may be used to stimulate the regeneration of mucosal surfaces.

[0541] In a specific embodiment, polynucleotides or polypeptides, and/or agonists thereof are used to diagnose, prognose, treat, and/or prevent a disorder characterized by primary or acquired immunodeficiency, deficient serum immunoglobulin production, recurrent infections, and/or immune system dysfunction. Moreover, polynucleotides or polypeptides, and/or agonists thereof may be used to treat or prevent infections of the joints, bones, skin, and/or parotid glands, blood-borne infections (e.g., sepsis, meningitis, septic arthritis, and/or osteomyelitis), autoimmune diseases (e.g., those disclosed herein), inflammatory disorders, and malignancies, and/or any disease or disorder or condition associated with these infections, diseases, disorders and/or malignancies) including, but not limited to, CVID, other primary immune deficiencies, HIV disease, CLL, recurrent bronchitis, sinusitis, otitis media, conjunctivitis, pneumonia, hepatitis, meningitis, herpes zoster (e.g., severe herpes zoster), and/or pneumocystis camii. Other diseases and disorders that may be prevented, diagnosed, prognosed, and/or treated with polynucleotides or polypeptides, and/or agonists of the present invention include, but are not limited to, HIV infection, HTLV-BLV infection, lymphopenia, phagocyte bactericidal dysfunction anemia, thrombocytopenia, and hemoglobinuria.

[0542] In another embodiment, polynucleotides, polypeptides, antibodies, and/or agonists or antagonists of the present invention are used to treat, and/or diagnose an individual having common variable immunodeficiency disease (“CVID”; also known as “acquired agammaglobulinemia” and “acquired hypogammaglobulinemia”) or a subset of this disease.

[0543] In a specific embodiment, polynucleotides, polypeptides, antibodies, and/or agonists or antagonists of the present invention may be used to diagnose, prognose, prevent, and/or treat cancers or neoplasms including immune cell or immune tissue-related cancers or neoplasms. Examples of cancers or neoplasms that may be prevented, diagnosed, or treated by polynucleotides, polypeptides, antibodies, and/or agonists or antagonists of the present invention include, but are not limited to, acute myelogenous leukemia, chronic myelogenous leukemia, Hodgkin's disease, non-Hodgkin's lymphoma, acute lymphocytic anemia (ALL) Chronic lymphocyte leukemia, plasmacytomas, multiple myeloma, Burkitt's lymphoma, EBV-transformed diseases, and/or diseases and disorders described in the section entitled “Hyperproliferative Disorders” elsewhere herein.

[0544] In another specific embodiment, polypeptides, antibodies, polynucleotides and/or agonists or antagonists of the present invention are used as a therapy for decreasing cellular proliferation of Large B-cell Lymphomas.

[0545] In another specific embodiment, polypeptides, antibodies, polynucleotides and/or agonists or antagonists of the present invention are used as a means of decreasing the involvement of B cells and Ig associated with Chronic Myelogenous Leukemia.

[0546] In specific embodiments, the compositions of the invention are used as an agent to boost immunoresponsiveness among B cell immunodeficient individuals, such as, for example, an individual who has undergone a partial or complete splenectomy.

[0547] Antagonists of the invention include, for example, binding and/or inhibitory antibodies, antisense nucleic acids, ribozymes or soluble forms of the polypeptides of the present invention (e.g., Fc fusion protein; see, e.g., Example 9). Agonists of the invention include, for example, binding or stimulatory antibodies, and soluble forms of the polypeptides (e.g., Fc fusion proteins; see, e.g., Example 9). polypeptides, antibodies, polynucleotides and/or agonists or antagonists of the present invention may be employed in a composition with a pharmaceutically acceptable carrier, e.g., as described herein.

[0548] In another embodiment, polypeptides, antibodies, polynucleotides and/or agonists or antagonists of the present invention are administered to an animal (including, but not limited to, those listed above, and also including transgenic animals) incapable of producing functional endogenous antibody molecules or having an otherwise compromised endogenous immune system, but which is capable of producing human immunoglobulin molecules by means of a reconstituted or partially reconstituted immune system from another animal (see, e.g., published PCT Application Nos. WO98/24893, WO/9634096, WO/9633735, and WO/9110741). Administration of polypeptides, antibodies, polynucleotides and/or agonists or antagonists of the present invention to such animals is useful for the generation of monoclonal antibodies against the polypeptides, antibodies, polynucleotides and/or agonists or antagonists of the present invention.

[0549] Blood-Related Disorders

[0550] The polynucleotides, polypeptides, antibodies, and/or agonists or antagonists of the present invention may be used to modulate hemostatic (the stopping of bleeding) or thrombolytic (clot dissolving) activity. For example, by increasing hemostatic or thrombolytic activity, polynucleotides or polypeptides, and/or agonists or antagonists of the present invention could be used to treat or prevent blood coagulation diseases, disorders, and/or conditions (e.g., afibrinogenemia, factor deficiencies, hemophilia), blood platelet diseases, disorders, and/or conditions (e.g., thrombocytopenia), or wounds resulting from trauma, surgery, or other causes. Alternatively, polynucleotides, polypeptides, antibodies, and/or agonists or antagonists of the present invention that can decrease hemostatic or thrombolytic activity could be used to inhibit or dissolve clotting. These molecules could be important in the treatment or prevention of heart attacks (infarction), strokes, or scarring.

[0551] In specific embodiments, the polynucleotides, polypeptides, antibodies, and/or agonists or antagonists of the present invention may be used to prevent, diagnose, prognose, and/or treat thrombosis, arterial thrombosis, venous thrombosis, thromboembolism, pulmonary embolism, atherosclerosis, myocardial infarction, transient ischemic attack, unstable angina. In specific embodiments, the polynucleotides, polypeptides, antibodies, and/or agonists or antagonists of the present invention may be used for the prevention of occulsion of saphenous grafts, for reducing the risk of periprocedural thrombosis as might accompany angioplasty procedures, for reducing the risk of stroke in patients with atrial fibrillation including nonrheumatic atrial fibrillation, for reducing the risk of embolism associated with mechanical heart valves and or mitral valves disease. Other uses for the polynucleotides, polypeptides, antibodies, and/or agonists or antagonists of the present invention, include, but are not limited to, the prevention of occlusions in extrcorporeal devices (e.g., intravascular canulas, vascular access shunts in hemodialysis patients, hemodialysis machines, and cardiopulmonary bypass machines).

[0552] In another embodiment, a polypeptide of the invention, or polynucleotides, antibodies, agonists, or antagonists corresponding to that polypeptide, may be used to prevent, diagnose, prognose, and/or treat diseases and disorders of the blood and/or blood forming organs associated with the tissue(s) in which the polypeptide of the invention is expressed, including one, two, three, four, five, or more tissues disclosed in Table 1A, column 8 (Tissue Distribution Library Code).

[0553] The polynucleotides, polypeptides, antibodies, and/or agonists or antagonists of the present invention may be used to modulate hematopoietic activity (the formation of blood cells). For example, the polynucleotides, polypeptides, antibodies, and/or agonists or antagonists of the present invention may be used to increase the quantity of all or subsets of blood cells, such as, for example, erythrocytes, lymphocytes (B or T cells), myeloid cells (e.g., basophils, eosinophils, neutrophils, mast cells, macrophages) and platelets. The ability to decrease the quantity of blood cells or subsets of blood cells may be useful in the prevention, detection, diagnosis and/or treatment of anemias and leukopenias described below. Alternatively, the polynucleotides, polypeptides, antibodies, and/or agonists or antagonists of the present invention may be used to decrease the quantity of all or subsets of blood cells, such as, for example, erythrocytes, lymphocytes (B or T cells), myeloid cells (e.g., basophils, eosinophils, neutrophils, mast cells, macrophages) and platelets. The ability to decrease the quantity of blood cells or subsets of blood cells may be useful in the prevention, detection, diagnosis and/or treatment of leukocytoses, such as, for example eosinophilia.

[0554] The polynucleotides, polypeptides, antibodies, and/or agonists or antagonists of the present invention may be used to prevent, treat, or diagnose blood dyscrasia.

[0555] Anemias are conditions in which the number of red blood cells or amount of hemoglobin (the protein that carries oxygen) in them is below normal. Anemia may be caused by excessive bleeding, decreased red blood cell production, or increased red blood cell destruction (hemolysis). The polynucleotides, polypeptides, antibodies, and/or agonists or antagonists of the present invention may be useful in treating, preventing, and/or diagnosing anemias. Anemias that may be treated prevented or diagnosed by the polynucleotides, polypeptides, antibodies, and/or agonists or antagonists of the present invention include iron deficiency anemia, hypochromic anemia, microcytic anemia, chlorosis, hereditary siderob;astic anemia, idiopathic acquired sideroblastic anemia, red cell aplasia, megaloblastic anemia (e.g., pernicious anemia, (vitamin B12 deficiency) and folic acid deficiency anemia), aplastic anemia, hemolytic anemias (e.g., autoimmune helolytic anemia, microangiopathic hemolytic anemia, and paroxysmal nocturnal hemoglobinuria). The polynucleotides, polypeptides, antibodies, and/or agonists or antagonists of the present invention may be useful in treating, preventing, and/or diagnosing anemias associated with diseases including but not limited to, anemias associated with systemic lupus erythematosus, cancers, lymphomas, chronic renal disease, and enlarged spleens. The polynucleotides, polypeptides, antibodies, and/or agonists or antagonists of the present invention may be useful in treating, preventing, and/or diagnosing anemias arising from drug treatments such as anemias associated with methyldopa, dapsone, and/or sulfadrugs. Additionally, rhe polynucleotides, polypeptides, antibodies, and/or agonists or antagonists of the present invention may be useful in treating, preventing, and/or diagnosing anemias associated with abnormal red blood cell architecture including but not limited to, hereditary spherocytosis, hereditary elliptocytosis, glucose-6-phosphate dehydrogenase deficiency, and sickle cell anemia.

[0556] The polynucleotides, polypeptides, antibodies, and/or agonists or antagonists of the present invention may be useful in treating, preventing, and/or diagnosing hemoglobin abnormalities, (e.g., those associated with sickle cell anemia, hemoglobin C disease, hemoglobin S-C disease, and hemoglobin E disease). Additionally, the polynucleotides, polypeptides, antibodies, and/or agonists or antagonists of the present invention may be useful in diagnosing, prognosing, preventing, and/or treating thalassemias, including, but not limited to major and minor forms of alpha-thalassemia and beta-thalassemia.

[0557] In another embodiment, the polynucleotides, polypeptides, antibodies, and/or agonists or antagonists of the present invention may be useful in diagnosing, prognosing, preventing, and/or treating bleeding disorders including, but not limited to, thrombocytopenia (e.g., idiopathic thrombocytopenic purpura, and thrombotic thrombocytopenic purpura), Von Willebrand's disease, hereditary platelet disorders (e.g., storage pool disease such as Chediak-Higashi and Hermansky-Pudlak syndromes, thromboxane A2 dysfunction, thromboasthenia, and Bernard-Soulier syndrome), hemolytic-uremic syndrome, hemophelias such as hemophelia A or Factor VII deficiency and Christmas disease or Factor IX deficiency, Hereditary Hemorhhagic Telangiectsia, also known as Rendu-Osler-Weber syndrome, allergic purpura (Henoch Schonlein purpura) and disseminated intravascular coagulation.

[0558] The effect of the polynucleotides, polypeptides, antibodies, and/or agonists or antagonists of the present invention on the clotting time of blood may be monitored using any of the clotting tests known in the art including, but not limited to, whole blood partial thromboplastin time (PTT), the activated partial thromboplastin time (aPTT), the activated clotting time (ACT), the recalcified activated clotting time, or the Lee-White Clotting time.

[0559] Several diseases and a variety of drugs can cause platelet dysfunction. Thus, in a specific embodiment, the polynucleotides, polypeptides, antibodies, and/or agonists or antagonists of the present invention may be useful in diagnosing, prognosing, preventing, and/or treating acquired platelet dysfunction such as platelet dysfunction accompanying kidney failure, leukemia, multiple myeloma, cirrhosis of the liver, and systemic lupus erythematosus as well as platelet dysfunction associated with drug treatments, including treatment with aspirin, ticlopidine, nonsteroidal anti-inflammatory drugs (used for arthritis, pain, and sprains), and penicillin in high doses.

[0560] In another embodiment, the polynucleotides, polypeptides, antibodies, and/or agonists or antagonists of the present invention may be useful in diagnosing, prognosing, preventing, and/or treating diseases and disorders characterized by or associated with increased or decreased numbers of white blood cells. Leukopenia occurs when the number of white blood cells decreases below normal. Leukopenias include, but are not limited to, neutropenia and lymphocytopenia. An increase in the number of white blood cells compared to normal is known as leukocytosis. The body generates increased numbers of white blood cells during infection. Thus, leukocytosis may simply be a normal physiological parameter that reflects infection. Alternatively, leukocytosis may be an indicator of injury or other disease such as cancer. Leokocytoses, include but are not limited to, eosinophilia, and accumulations of macrophages. In specific embodiments, the polynucleotides, polypeptides, antibodies, and/or agonists or antagonists of the present invention may be useful in diagnosing, prognosing, preventing, and/or treating leukopenia. In other specific embodiments, the polynucleotides, polypeptides, antibodies, and/or agonists or antagonists of the present invention may be useful in diagnosing, prognosing, preventing, and/or treating leukocytosis.

[0561] Leukopenia may be a generalized decreased in all types of white blood cells, or may be a specific depletion of particular types of white blood cells. Thus, in specific embodiments, the polynucleotides, polypeptides, antibodies, and/or agonists or antagonists of the present invention may be useful in diagnosing, prognosing, preventing, and/or treating decreases in neutrophil numbers, known as neutropenia. Neutropenias that may be diagnosed, prognosed, prevented, and/or treated by the polynucleotides, polypeptides, antibodies, and/or agonists or antagonists of the present invention include, but are not limited to, infantile genetic agranulocytosis, familial neutropenia, cyclic neutropenia, neutropenias resulting from or associated with dietary deficiencies (e.g., vitamin B 12 deficiency or folic acid deficiency), neutropenias resulting from or associated with drug treatments (e.g., antibiotic regimens such as penicillin treatment, sulfonamide treatment, anticoagulant treatment, anticonvulsant drugs, anti-thyroid drugs, and cancer chemotherapy), and neutropenias resulting from increased neutrophil destruction that may occur in association with some bacterial or viral infections, allergic disorders, autoimmune diseases, conditions in which an individual has an enlarged spleen (e.g., Felty syndrome, malaria and sarcoidosis), and some drug treatment regimens.

[0562] The polynucleotides, polypeptides, antibodies, and/or agonists or antagonists of the present invention may be useful in diagnosing, prognosing, preventing, and/or treating lymphocytopenias (decreased numbers of B and/or T lymphocytes), including, but not limited lymphocytopenias resulting from or associated with stress, drug treatments (e.g., drug treatment with corticosteroids, cancer chemotherapies, and/or radiation therapies), AIDS infection and/or other diseases such as, for example, cancer, rheumatoid arthritis, systemic lupus erythematosus, chronic infections, some viral infections and/or hereditary disorders (e.g., DiGeorge syndrome, Wiskott-Aldrich Syndome, severe combined immunodeficiency, ataxia telangiectsia).

[0563] The polynucleotides, polypeptides, antibodies, and/or agonists or antagonists of the present invention may be useful in diagnosing, prognosing, preventing, and/or treating diseases and disorders associated with macrophage numbers and/or macrophage function including, but not limited to, Gaucher's disease, Niemann-Pick disease, Letterer-Siwe disease and Hand-Schuller-Christian disease.

[0564] In another embodiment, the polynucleotides, polypeptides, antibodies, and/or agonists or antagonists of the present invention may be useful in diagnosing, prognosing, preventing, and/or treating diseases and disorders associated with eosinophil numbers and/or eosinophil function including, but not limited to, idiopathic hypereosinophilic syndrome, eosinophilia-myalgia syndrome, and Hand-Schuller-Christian disease.

[0565] In yet another embodiment, the polynucleotides, polypeptides, antibodies, and/or agonists or antagonists of the present invention may be useful in diagnosing, prognosing, preventing, and/or treating leukemias and lymphomas including, but not limited to, acute lymphocytic (lymphpblastic) leukemia (ALL), acute myeloid (myelocytic, myelogenous, myeloblastic, or myelomonocytic) leukemia, chronic lymphocytic leukemia (e.g., B cell leukemias, T cell leukemias, Sezary syndrome, and Hairy cell leukenia), chronic myelocytic (myeloid, myelogenous, or granulocytic) leukemia, Hodgkin's lymphoma, non-hodgkin's lymphoma, Burkitt's lymphoma, and mycosis fungoides.

[0566] In other embodiments, the polynucleotides, polypeptides, antibodies, and/or agonists or antagonists of the present invention may be useful in diagnosing, prognosing, preventing, and/or treating diseases and disorders of plasma cells including, but not limited to, plasma cell dyscrasias, monoclonal gammaopathies, monoclonal gammopathies of undetermined significance, multiple myeloma, macroglobulinemia, Waldenstrom's macroglobulinemia, cryoglobulinemia, and Raynaud's phenomenon.

[0567] In other embodiments, the polynucleotides, polypeptides, antibodies, and/or agonists or antagonists of the present invention may be useful in treating, preventing, and/or diagnosing myeloproliferative disorders, including but not limited to, polycythemia vera, relative polycythemia, secondary polycythemia, myelofibrosis, acute myelofibrosis, agnogenic myelod metaplasia, thrombocythemia, (including both primary and seconday thrombocythemia) and chronic myelocytic leukemia.

[0568] In other embodiments, the polynucleotides, polypeptides, antibodies, and/or agonists or antagonists of the present invention may be useful as a treatment prior to surgery, to increase blood cell production.

[0569] In other embodiments, the polynucleotides, polypeptides, antibodies, and/or agonists or antagonists of the present invention may be useful as an agent to enhance the migration, phagocytosis, superoxide production, antibody dependent cellular cytotoxicity of neutrophils, eosionophils and macrophages.

[0570] In other embodiments, the polynucleotides, polypeptides, antibodies, and/or agonists or antagonists of the present invention may be useful as an agent to increase the number of stem cells in circulation prior to stem cells pheresis. In another specific embodiment, the polynucleotides, polypeptides, antibodies, and/or agonists or antagonists of the present invention may be useful as an agent to increase the number of stem cells in circulation prior to platelet pheresis.

[0571] In other embodiments, the polynucleotides, polypeptides, antibodies, and/or agonists or antagonists of the present invention may be useful as an agent to increase cytokine production.

[0572] In other embodiments, the polynucleotides, polypeptides, antibodies, and/or agonists or antagonists of the present invention may be useful in preventing, diagnosing, and/or treating primary hematopoietic disorders.

[0573] Hyperproliferative Disorders

[0574] In certain embodiments, polynucleotides or polypeptides, or agonists or antagonists of the present invention can be used to treat or detect hyperproliferative disorders, including neoplasms. Polynucleotides or polypeptides, or agonists or antagonists of the present invention may inhibit the proliferation of the disorder through direct or indirect interactions. Alternatively, Polynucleotides or polypeptides, or agonists or antagonists of the present invention may proliferate other cells which can inhibit the hyperproliferative disorder.

[0575] For example, by increasing an immune response, particularly increasing aritigenic qualities of the hyperproliferative disorder or by proliferating, differentiating, or mobilizing T-cells, hyperproliferative disorders can be treated. This immune response may be increased by either enhancing an existing immune response, or by initiating a new immune response. Alternatively, decreasing an immune response may also be a method of treating hyperproliferative disorders, such as a chemotherapeutic agent.

[0576] Examples of hyperproliferative disorders that can be treated or detected by polynucleotides or polypeptides, or agonists or antagonists of the present invention include, but are not limited to neoplasms located in the: colon, abdomen, bone, breast, digestive system, liver, pancreas, peritoneum, endocrine glands (adrenal, parathyroid, pituitary, testicles, ovary, thymus, thyroid), eye, head and neck, nervous (central and peripheral), lymphatic system, pelvis, skin, soft tissue, spleen, thorax, and urogenital tract.

[0577] Similarly, other hyperproliferative disorders can also be treated or detected by polynucleotides or polypeptides, or agonists or antagonists of the present invention. Examples of such hyperproliferative disorders include, but are not limited to: Acute Childhood Lymphoblastic Leukemia, Acute Lymphoblastic Leukemia, Acute Lymphocytic Leukemia, Acute Myeloid Leukemia, Adrenocortical Carcinoma, Adult (Primary) Hepatocellular Cancer, Adult (Primary) Liver Cancer, Adult Acute Lymphocytic Leukemia, Adult Acute Myeloid Leukemia, Adult Hodgkin's Disease, Adult Hodgkin's Lymphoma, Adult Lymphocytic Leukemia, Adult Non-Hodgkin's Lymphoma, Adult Primary Liver Cancer, Adult Soft Tissue Sarcoma, AIDS-Related Lymphoma, AIDS-Related Malignancies, Anal Cancer, Astrocytoma, Bile Duct Cancer, Bladder Cancer, Bone Cancer, Brain Stem Glioma, Brain Tumors, Breast Cancer, Cancer of the Renal Pelvis and Ureter, Central Nervous System (Primary) Lymphoma, Central Nervous System Lymphoma, Cerebellar Astrocytoma, Cerebral Astrocytoma, Cervical Cancer, Childhood (Primary) Hepatocellular Cancer, Childhood (Primary) Liver Cancer, Childhood Acute Lymphoblastic Leukemia, Childhood Acute Myeloid Leukemia, Childhood Brain Stem Glioma, Childhood Cerebellar Astrocytoma, Childhood Cerebral Astrocytoma, Childhood Extracranial Germ Cell Tumors, Childhood Hodgkin's Disease, Childhood Hodgkin's Lymphoma, Childhood Hypothalamic and Visual Pathway Glioma, Childhood Lymphoblastic Leukemia, Childhood Medulloblastoma, Childhood Non-Hodgkin's Lymphoma, Childhood Pineal and Supratentorial Primitive Neuroectodermal Tumors, Childhood Primary Liver Cancer, Childhood Rhabdomyosarcoma, Childhood Soft Tissue Sarcoma, Childhood Visual Pathway and Hypothalamic Glioma, Chronic Lymphocytic Leukemia, Chronic Myelogenous Leukemia, Colon Cancer, Cutaneous T-Cell Lymphoma, Endocrine Pancreas Islet Cell Carcinoma, Endometrial Cancer, Ependymoma, Epithelial Cancer, Esophageal Cancer, Ewing's Sarcoma and Related Tumors, Exocrine Pancreatic Cancer, Extracranial Germ Cell Tumor, Extragonadal Germ Cell Tumor, Extrahepatic Bile Duct Cancer, Eye Cancer, Female Breast Cancer, Gaucher's Disease, Gallbladder Cancer, Gastric Cancer, Gastrointestinal Carcinoid Tumor, Gastrointestinal Tumors, Germ Cell Tumors, Gestational Trophoblastic Tumor, Hairy Cell Leukemia, Head and Neck Cancer, Hepatocellular Cancer, Hodgkin's Disease, Hodgkin's Lymphoma, Hypergammaglobulinemia, Hypopharyngeal Cancer, Intestinal Cancers, Intraocular Melanoma, Islet Cell Carcinoma, Islet Cell Pancreatic Cancer, Kaposi's Sarcoma, Kidney Cancer, Laryngeal Cancer, Lip and Oral Cavity Cancer, Liver Cancer, Lung Cancer, Lymphoproliferative Disorders, Macroglobulinemia, Male Breast Cancer, Malignant Mesothelioma, Malignant Thymoma, Medulloblastoma, Melanoma, Mesothelioma, Metastatic Occult Primary Squamous Neck Cancer, Metastatic Primary Squamous Neck Cancer, Metastatic Squamous Neck Cancer, Multiple Myeloma, Multiple Myeloma/Plasma Cell Neoplasm, Myelodysplastic Syndrome, Myelogenous Leukemia, Myeloid Leukemia, Myeloproliferative Disorders, Nasal Cavity and Paranasal Sinus Cancer, Nasopharyngeal Cancer, Neuroblastoma, Non-Hodgkin's Lymphoma During Pregnancy, Nonmelanoma Skin Cancer, Non-Small Cell Lung Cancer, Occult Primary Metastatic Squamous Neck Cancer, Oropharyngeal Cancer, Osteo-/Malignant Fibrous Sarcoma, Osteosarcoma/Malignant Fibrous Histiocytoma, Osteosarcoma/Malignant Fibrous Histiocytoma of Bone, Ovarian Epithelial Cancer, Ovarian Germ Cell Tumor, Ovarian Low Malignant Potential Tumor, Pancreatic Cancer, Paraproteinemias, Purpura, Parathyroid Cancer, Penile Cancer, Pheochromocytoma, Pituitary Tumor, Plasma Cell Neoplasm/Multiple Myeloma, Primary Central Nervous System Lymphoma, Primary Liver Cancer, Prostate Cancer, Rectal Cancer, Renal Cell Cancer, Renal Pelvis and Ureter Cancer, Retinoblastoma, Rhabdomyosarcoma, Salivary Gland Cancer, Sarcoidosis Sarcomas, Sezary Syndrome, Skin Cancer, Small Cell Lung Cancer, Small, Intestine Cancer, Soft Tissue Sarcoma, Squamous Neck Cancer, Stomach Cancer, Supratentorial Primitive Neuroectodermal and Pineal Tumors, T-Cell Lymphoma, Testicular Cancer, Thymoma, Thyroid Cancer, Transitional Cell Cancer of the Renal Pelvis and Ureter, Transitional Renal Pelvis and Ureter Cancer, Trophoblastic Tumors, Ureter and Renal Pelvis Cell Cancer, Urethral Cancer, Uterine Cancer, Uterine Sarcoma, Vaginal Cancer, Visual Pathway and Hypothalamic Glioma, Vulvar Cancer, Waldenstrom's Macroglobulinemia, Wilms' Tumor, and any other hyperproliferative disease, besides neoplasia, located in an organ system listed above.

[0578] In another preferred embodiment, polynucleotides or polypeptides, or agonists or antagonists of the present invention are used to diagnose, prognose, prevent, and/or treat premalignant conditions and to prevent progression to a neoplastic or malignant state, including but not limited to those disorders described above. Such uses are indicated in conditions known or suspected of preceding progression to neoplasia or cancer, in particular, where non-neoplastic cell growth consisting of hyperplasia, metaplasia, or most particularly, dysplasia has occurred (for review of such abnormal growth conditions, see Robbins and Angell, 1976, Basic Pathology, 2d Ed., W. B. Saunders Co., Philadelphia, pp. 68-79.)

[0579] Hyperplasia is a form of controlled cell proliferation, involving an increase in cell number in a tissue or organ, without significant alteration in structure or function. Hyperplastic disorders which can be diagnosed, prognosed, prevented, and/or treated with compositions of the invention (including polynucleotides, polypeptides, agonists or antagonists) include, but are not limited to, angiofollicular mediastinal lymph node hyperplasia, angiolymphoid hyperplasia with eosinophilia, atypical melanocytic hyperplasia, basal cell hyperplasia, benign giant lymph node hyperplasia, cementum hyperplasia, congenital adrenal hyperplasia, congenital sebaceous hyperplasia, cystic hyperplasia, cystic hyperplasia of the breast, denture hyperplasia, ductal hyperplasia, endometrial hyperplasia, fibromuscular hyperplasia, focal epithelial hyperplasia, gingival hyperplasia, inflammatory fibrous hyperplasia, inflammatory papillary hyperplasia, intravascular papillary endothelial hyperplasia, nodular hyperplasia of prostate, nodular regenerative hyperplasia, pseudoepitheliomatous hyperplasia, senile sebaceous hyperplasia, and verrucous hyperplasia.

[0580] Metaplasia is a form of controlled cell growth in which one type of adult or fully differentiated cell substitutes for another type of adult cell. Metaplastic disorders which can be diagnosed, prognosed, prevented, and/or treated with compositions of the invention (including polynucleotides, polypeptides, agonists or antagonists) include, but are not limited to, agnogenic myeloid metaplasia, apocrine metaplasia, atypical metaplasia, autoparenchymatous metaplasia, connective tissue metaplasia, epithelial metaplasia, intestinal metaplasia, metaplastic anemia, metaplastic ossification, metaplastic polyps, myeloid metaplasia, primary myeloid metaplasia, secondary myeloid metaplasia, squamous metaplasia, squamous metaplasia of amnion, and symptomatic myeloid metaplasia.

[0581] Dysplasia is frequently a forerunner of cancer, and is found mainly in the epithelia; it is the most disorderly form of non-neoplastic cell growth, involving a loss in individual cell uniformity and in the architectural orientation of cells. Dysplastic cells often have abnormally large, deeply stained nuclei, and exhibit pleomorphism. Dysplasia characteristically occurs where there exists chronic irritation or inflammation. Dysplastic disorders which can be diagnosed, prognosed, prevented, and/or treated with compositions of the invention (including polynucleotides, polypeptides, agonists or antagonists) include, but are not limited to, anhidrotic ectodermal dysplasia, anterofacial dysplasia, asphyxiating thoracic dysplasia, atriodigital dysplasia, bronchopulmonary dysplasia, cerebral dysplasia, cervical dysplasia, chondroectodermal dysplasia, cleidocranial dysplasia, congenital ectodermal dysplasia, craniodiaphysial dysplasia, craniocarpotarsal dysplasia, craniometaphysial dysplasia, dentin dysplasia, diaphysial dysplasia, ectodermal dysplasia, enamel dysplasia, encephalo-ophthalmic dysplasia, dysplasia epiphysialis hemimelia, dysplasia epiphysialis multiplex, dysplasia epiphysialis punctata, epithelial dysplasia, faciodigitogenital dysplasia, familial fibrous dysplasia of jaws, familial white folded dysplasia, fibromuscular dysplasia, fibrous dysplasia of bone, florid osseous dysplasia, hereditary renal-retinal dysplasia, hidrotic ectodermal dysplasia, hypohidrotic ectodermal dysplasia, lymphopenic thymic dysplasia, mammary dysplasia, mandibulofacial dysplasia, metaphysial dysplasia, Mondini dysplasia, monostotic fibrous dysplasia, mucoepithelial dysplasia, multiple epiphysial dysplasia, oculoauriculovertebral dysplasia, oculodentodigital dysplasia, oculovertebral dysplasia, odontogenic dysplasia, ophthalmomandibulomelic dysplasia, periapical cemental dysplasia, polyostotic fibrous dysplasia, pseudoachondroplastic spondyloepiphysial dysplasia, retinal dysplasia, septo-optic dysplasia, spondyloepiphysial dysplasia, and ventriculoradial dysplasia.

[0582] Additional pre-neoplastic disorders which can be diagnosed, prognosed, prevented, and/or treated with compositions of the invention (including polynucleotides, polypeptides, agonists or antagonists) include, but are not limited to, benign dysproliferative disorders (e.g., benign tumors, fibrocystic conditions, tissue hypertrophy, intestinal polyps, colon polyps, and esophageal dysplasia), leukoplakia, keratoses, Bowen's disease, Farmer's Skin, solar cheilitis, and solar keratosis.

[0583] In another embodiment, a polypeptide of the invention, or polynucleotides, antibodies, agonists, or antagonists corresponding to that polypeptide, may be used to diagnose and/or prognose disorders associated with the tissue(s) in which the polypeptide of the invention is expressed, including one, two, three, four, five, or more tissues disclosed in Table 1A, column 8 (Tissue Distribution Library Code).

[0584] In another embodiment, polynucleotides, polypeptides, antibodies, and/or agonists or antagonists of the present invention conjugated to a toxin or a radioactive isotope, as described herein, may be used to treat cancers and neoplasms, including, but not limited to those described herein. In a further preferred embodiment, polynucleotides, polypeptides, antibodies, and/or agonists or antagonists of the present invention conjugated to a toxin or a radioactive isotope, as described herein, may be used to treat acute myelogenous leukemia.

[0585] Additionally, polynucleotides, polypeptides, and/or agonists or antagonists of the invention may affect apoptosis, and therefore, would be useful in treating a number of diseases associated with increased cell survival or the inhibition of apoptosis. For example, diseases associated with increased cell survival or the inhibition of apoptosis that could be diagnosed, prognosed, prevented, and/or treated by polynucleotides, polypeptides, and/or agonists or antagonists of the invention, include cancers (such as follicular lymphomas, carcinomas with p53 mutations, and hormone-dependent tumors, including, but not limited to colon cancer, cardiac tumors, pancreatic cancer, melanoma, retinoblastoma, glioblastoma, lung cancer, intestinal cancer, testicular cancer, stomach cancer, neuroblastoma, myxoma, myoma, lymphoma, endothelioma, osteoblastoma, osteoclastoma, osteosarcoma, chondrosarcoma, adenoma, breast cancer, prostate cancer, Kaposi's sarcoma and ovarian cancer); autoimmune disorders such as, multiple sclerosis, Sjogren's syndrome, Hashimoto's thyroiditis, biliary cirrhosis, Behcet's disease, Crohn's disease, polymyositis, systemic lupus erythematosus and immune-related glomerulonephritis and rheumatoid arthritis) and viral infections (such as herpes viruses, pox viruses and adenoviruses), inflammation, graft v. host disease, acute graft rejection, and chronic graft rejection.

[0586] In preferred embodiments, polynucleotides, polypeptides, and/or agonists or antagonists of the invention are used to inhibit growth, progression, and/or metastasis of cancers, in particular those listed above.

[0587] Additional diseases or conditions associated with increased cell survival that could be diagnosed, prognosed, prevented, and/or treated by polynucleotides, polypeptides, and/or agonists or antagonists of the invention, include, but are not limited to, progression, and/or metastases of malignancies and related disorders such as leukemia (including acute leukemias (e.g., acute lymphocytic leukemia, acute myelocytic leukemia (including myeloblastic, promyelocytic, myelomonocytic, monocytic, and erythroleukemia)) and chronic leukemias (e.g., chronic myelocytic (granulocytic) leukemia and chronic lymphocytic leukemia)), polycythemia vera, lymphomas (e.g., Hodgkin's disease and non-Hodgkin's disease), multiple myeloma, Waldenstrom's macroglobulinemia, heavy chain disease, and solid tumors including, but not limited to, sarcomas and carcinomas such as fibrosarcoma, myxosarcoma, liposarcoma, chondrosarcoma, osteogenic sarcoma, chordoma, angiosarcoma, endotheliosarcoma, lymphangiosarcoma, lymphangioendotheliosarcoma, synovioma, mesothelioma, Ewing's tumor, leiomyosarcoma, rhabdomyosarcoma, colon carcinoma, pancreatic cancer, breast cancer, ovarian cancer, prostate cancer, squamous cell carcinoma, basal cell carcinoma, adenocarcinoma, sweat gland carcinoma, sebaceous gland carcinoma, papillary carcinoma, papillary adenocarcinomas, cystadenocarcinoma, medullary carcinoma, bronchogenic carcinoma, renal cell carcinoma, hepatoma, bile duct carcinoma, choriocarcinoma, seminoma, embryonal carcinoma, Wilm's tumor, cervical cancer, testicular tumor, lung carcinoma, small cell lung carcinoma, bladder carcinoma, epithelial carcinoma, glioma, astrocytoma, medulloblastoma, craniopharyngioma, ependymoma, pinealoma, emangioblastoma, acoustic neuroma, oligodendroglioma, menangioma, melanoma, neuroblastoma, and retinoblastoma.

[0588] Diseases associated with increased apoptosis that could be diagnosed, prognosed, prevented, and/or treated by polynucleotides, polypeptides, and/or agonists or antagonists of the invention, include AIDS; neurodegenerative disorders (such as Alzheimer's disease, Parkinson's disease, amyotrophic lateral sclerosis, retinitis pigmentosa, cerebellar degeneration and brain tumor or prior associated disease); autoimmune disorders (such as, multiple sclerosis, Sjogren's syndrome, Hashimoto's thyroiditis, biliary cirrhosis, Behcet's disease, Crohn's disease, polymyositis, systemic lupus erythematosus and immune-related glomerulonephritis and rheumatoid arthritis) myelodysplastic syndromes (such as aplastic anemia), graft v. host disease, ischemic injury (such as that caused by myocardial infarction, stroke and reperfusion injury), liver injury (e.g., hepatitis related liver injury, ischemia/reperfusion injury, cholestosis (bile duct injury) and liver cancer); toxin-induced liver disease (such as that caused by alcohol), septic shock, cachexia and anorexia.

[0589] Hyperproliferative diseases and/or disorders that could be diagnosed, prognosed, prevented, and/or treated by polynucleotides, polypeptides, and/or agonists or antagonists of the invention, include, but are not limited to, neoplasms located in the liver, abdomen, bone, breast, digestive system, pancreas, peritoneum, endocrine glands (adrenal, parathyroid, pituitary, testicles, ovary, thymus, thyroid), eye, head and neck, nervous system (central and peripheral), lymphatic system, pelvis, skin, soft tissue, spleen, thorax, and urogenital tract.

[0590] Similarly, other hyperproliferative disorders can also be diagnosed, prognosed, prevented, and/or treated by polynucleotides, polypeptides, and/or agonists or antagonists of the invention. Examples of such hyperproliferative disorders include, but are not limited to: hypergammaglobulinemia, lymphoproliferative disorders, paraproteinemias, purpura, sarcoidosis, Sezary Syndrome, Waldenstron's macroglobulinemia, Gaucher's Disease, histiocytosis, and any other hyperproliferative disease, besides neoplasia, located in an organ system listed above.

[0591] Another preferred embodiment utilizes polynucleotides of the present invention to inhibit aberrant cellular division, by gene therapy using the present invention, and/or protein fusions or fragments thereof.

[0592] Thus, the present invention provides a method for treating cell proliferative disorders by inserting into an abnormally proliferating cell a polynucleotide of the present invention, wherein said polynucleotide represses said expression.

[0593] Another embodiment of the present invention provides a method of treating cell-proliferative disorders in individuals comprising administration of one or more active gene copies of the present invention to an abnormally proliferating cell or cells. In a preferred embodiment, polynucleotides of the present invention is a DNA construct comprising a recombinant expression vector effective in expressing a DNA sequence encoding said polynucleotides. In another preferred embodiment of the present invention, the DNA construct encoding the poynucleotides of the present invention is inserted into cells to be treated utilizing a retrovirus, or more preferably an adenoviral vector (See G J. Nabel, et. al., PNAS 1999 96: 324-326, which is hereby incorporated by reference). In a most preferred embodiment, the viral vector is defective and will not transform non-proliferating cells, only proliferating cells. Moreover, in a preferred embodiment, the polynucleotides of the present invention inserted into proliferating cells either alone, or in combination with or fused to other polynucleotides, can then be modulated via an external stimulus (i.e. magnetic, specific small molecule, chemical, or drug administration, etc.), which acts upon the promoter upstream of said polynucleotides to induce expression of the encoded protein product. As such the beneficial therapeutic affect of the present invention may be expressly modulated (i.e. to increase, decrease, or inhibit expression of the present invention) based upon said external stimulus.

[0594] Polynucleotides of the present invention may be useful in repressing expression of oncogenic genes or antigens. By “repressing expression of the oncogenic genes ” is intended the suppression of the transcription of the gene, the degradation of the gene transcript (pre-message RNA), the inhibition of splicing, the destruction of the messenger RNA, the prevention of the post-translational modifications of the protein, the destruction of the protein, or the inhibition of the normal function of the protein.

[0595] For local administration to abnormally proliferating cells, polynucleotides of the present invention may be administered by any method known to those of skill in the art including, but not limited to transfection, electroporation, microinjection of cells, or in vehicles such as liposomes, lipofectin, or as naked polynucleotides, or any other method described throughout the specification. The polynucleotide of the present invention may be delivered by known gene delivery systems such as, but not limited to, retroviral vectors (Gilboa, J. Virology 44:845 (1982); Hocke, Nature 320:275 (1986); Wilson, et al., Proc. Natl. Acad. Sci. U.S.A. 85:3014), vaccinia virus system (Chakrabarty et al., Mol. Cell Biol. 5:3403 (1985) or other efficient DNA delivery systems (Yates et al., Nature 313:812 (1985)) known to those skilled in the art. These references are exemplary only and are hereby incorporated by reference. In order to specifically deliver or transfect cells which are abnormally proliferating and spare non-dividing cells, it is preferable to utilize a retrovirus, or adenoviral (as described in the art and elsewhere herein) delivery system known to those of skill in the art. Since host DNA replication is required for retroviral DNA to integrate and the retrovirus will be unable to self replicate due to the lack of the retrovirus genes needed for its life cycle. Utilizing such a retroviral delivery system for polynucleotides of the present invention will target said gene and constructs to abnormally proliferating cells and will spare the non-dividing normal cells.

[0596] The polynucleotides of the present invention may be delivered directly to cell proliferative disorder/disease sites in internal organs, body cavities and the like by use of imaging devices used to guide an injecting needle directly to the disease site. The polynucleotides of the present invention may also be administered to disease sites at the time of surgical intervention.

[0597] By “cell proliferative disease” is meant any human or animal disease or disorder, affecting any one or any combination of organs, cavities, or body parts, which is characterized by single or multiple local abnormal proliferations of cells, groups of cells, or tissues, whether benign or malignant.

[0598] Any amount of the polynucleotides of the present invention may be administered as long as it has a biologically inhibiting effect on the proliferation of the treated cells. Moreover, it is possible to administer more than one of the polynucleotide of the present invention simultaneously to the same site. By “biologically inhibiting” is meant partial or total growth inhibition as well as decreases in the rate of proliferation or growth of the cells. The biologically inhibitory dose may be determined by assessing the effects of the polynucleotides of the present invention on target malignant or abnormally proliferating cell growth in tissue culture, tumor growth in animals and cell cultures, or any other method known to one of ordinary skill in the art.

[0599] The present invention is further directed to antibody-based therapies which involve administering of anti-polypeptides and anti-polynucleotide antibodies to a mammalian, preferably human, patient for treating one or more of the described disorders. Methods for producing anti-polypeptides and anti-polynucleotide antibodies polyclonal and monoclonal antibodies are described in detail elsewhere herein. Such antibodies may be provided in pharmaceutically acceptable compositions as known in the art or as described herein.

[0600] A summary of the ways in which the antibodies of the present invention may be used therapeutically includes binding polynucleotides or polypeptides of the present invention locally or systemically in the body or by direct cytotoxicity of the antibody, e.g. as mediated by complement (CDC) or by effector cells (ADCC). Some of these approaches are described in more detail below. Armed with the teachings provided herein, one of ordinary skill in the art will know how to use the antibodies of the present invention for diagnostic, monitoring or therapeutic purposes without undue experimentation.

[0601] In particular, the antibodies, fragments and derivatives of the present invention are useful for treating a subject having or developing cell proliferative and/or differentiation disorders as described herein. Such treatment comprises administering a single or multiple doses of the antibody, or a fragment, derivative, or a conjugate thereof.

[0602] The antibodies of this invention may be advantageously utilized in combination with other monoclonal or chimeric antibodies, or with lymphokines or hematopoietic growth factors, for example., which serve to increase the number or activity of effector cells which interact with the antibodies.

[0603] It is preferred to use high affinity and/or potent in vivo inhibiting and/or neutralizing antibodies against polypeptides or polynucleotides of the present invention, fragments or regions thereof, for both immunoassays directed to and therapy of disorders related to polynucleotides or polypeptides, including fragements thereof, of the present invention. Such antibodies, fragments, or regions, will preferably have an affinity for polynucleotides or polypeptides, including fragements thereof. Preferred binding affinities include those with a dissociation constant or Kd less than 5×10⁻⁶M, 10⁻⁶M, 5×10⁻⁷M, 10⁻⁷M, 5×10⁻⁸M, 10⁻⁸M, 5×10⁻⁹M, 10⁻⁹M, 5×10⁻¹⁰M, 10⁻¹⁰M, 5×10⁻¹¹M, 10⁻¹¹M, 5×10⁻¹²M, 10⁻¹²M, 5×10¹³M, 10¹³M, 5×10¹⁴M, 10⁻¹⁴M, 5×10⁻¹⁵M, and 10⁻¹⁵M.

[0604] Moreover, polypeptides of the present invention are useful in inhibiting the angiogenesis of proliferative cells or tissues, either alone, as a protein fusion, or in combination with other polypeptides directly or indirectly, as described elsewhere herein. In a most preferred embodiment, said anti-angiogenesis effect may be achieved indirectly, for example, through the inhibition of hematopoietic, tumor-specific cells, such as tumor-associated macrophages (See Joseph I B, et al. J Natl Cancer Inst, 90(21):1648-53 (1998), which is hereby incorporated by reference). Antibodies directed to polypeptides or polynucleotides of the present invention may also result in inhibition of angiogenesis directly, or indirectly (See Witte L, et al., Cancer Metastasis Rev. 17(2):155-61 (1998), which is hereby incorporated by reference)).

[0605] Polypeptides, including protein fusions, of the present invention, or fragments thereof may be useful in inhibiting proliferative cells or tissues through the induction of apoptosis. Said polypeptides may act either directly, or indirectly to induce apoptosis of proliferative cells and tissues, for example in the activation of a death-domain receptor, such as tumor necrosis factor (TNF) receptor-1, CD95 (Fas/APO-1); TNF-receptor-related apoptosis-mediated protein (TRAMP) and TNF-related apoptosis-inducing ligand (TRAIL) receptor-1 and -2 (See Schulze-Osthoff K, et. al., Eur J Biochem 254(3):439-59 (1998), which is hereby incorporated by reference). Moreover, in another preferred embodiment of the present invention, said polypeptides may induce apoptosis through other mechanisms, such as in the activation of other proteins which will activate apoptosis, or through stimulating the expression of said proteins, either alone or in combination with small molecule drugs or adjuviants, such as apoptonin, galectins, thioredoxins, anti-inflammatory proteins (See for example, Mutat Res 400(1-2):447-55 (1998), Med H potheses.50(5):423-33 (1998), Chem Biol Interact. Apr 24;111-112:23-34 (1998), J Mol Med. 76(6):402-12 (1998), Int J Tissue React;20(1):3-15 (1998), which are all hereby incorporated by reference).

[0606] Polypeptides, including protein fusions to, or fragments thereof, of the present invention are useful in inhibiting the metastasis of proliferative cells or tissues. Inhibition may occur as a direct result of administering polypeptides, or antibodies directed to said polypeptides as described elsewere herein, or indirectly, such as activating the expression of proteins known to inhibit metastasis, for example alpha 4 integrins, (See, e.g., Curr Top Microbiol Immunol 1998;231:125-41, which is hereby incorporated by reference). Such thereapeutic affects of the present invention may be achieved either alone, or in combination with small molecule drugs or adjuvants.

[0607] In another embodiment, the invention provides a method of delivering compositions containing the polypeptides of the invention (e.g., compositions containing polypeptides or polypeptide antibodes associated with heterologous polypeptides, heterologous nucleic acids, toxins, or prodrugs) to targeted cells expressing the polypeptide of the present invention. Polypeptides or polypeptide antibodes of the invention may be associated with with heterologous polypeptides, heterologous nucleic acids, toxins, or prodrugs via hydrophobic, hydrophilic, ionic and/or covalent interactions.

[0608] Polypeptides, protein fusions to, or fragments thereof, of the present invention are useful in enhancing the immunogenicity and/or antigenicity of proliferating cells or tissues, either directly, such as would occur if the polypeptides of the present invention ‘vaccinated’ the immune response to respond to proliferative antigens and immunogens, or indirectly, such as in activating the expression of proteins known to enhance the immune response (e.g. chemokines), to said antigens and immunogens. Renal Disorders

[0609] Polynucleotides, polypeptides, antibodies, and/or agonists or antagonists of the present invention, may be used to treat, prevent, diagnose, and/or prognose disorders of the renal system. Renal disorders which can be diagnosed, prognosed, prevented, and/or treated with compositions of the invention include, but are not limited to, kidney failure, nephritis, blood vessel disorders of kidney, metabolic and congenital kidney disorders, urinary disorders of the kidney, autoimmune disorders, sclerosis and necrosis, electrolyte imbalance, and kidney cancers.

[0610] Kidney diseases which can be diagnosed, prognosed, prevented, and/or treated with compositions of the invention include, but are not limited to, acute kidney failure, chronic kidney failure, atheroembolic renal failure, end-stage renal disease, inflammatory diseases of the kidney (e.g., acute glomerulonephritis, postinfectious glomerulonephritis, rapidly progressive glomerulonephritis, nephrotic syndrome, membranous glomerulonephritis, familial nephrotic syndrome, membranoproliferative glomerulonephritis I and II, mesangial proliferative glomerulonephritis, chronic glomerulonephritis, acute tubulointerstitial nephritis, chronic tubulointerstitial nephritis, acute post-streptococcal glomerulonephritis (PSGN), pyelonephritis, lupus nephritis, chronic nephritis, interstitial nephritis, and post-streptococcal glomerulonephritis), blood vessel disorders of the kidneys (e.g., kidney infarction, atheroembolic kidney disease, cortical necrosis, malignant nephrosclerosis, renal vein thrombosis, renal underperfusion, renal retinopathy, renal ischemia-reperfusion, renal artery embolism, and renal artery stenosis), and kidney disorders resulting form urinary tract disease (e.g., pyelonephritis, hydronephrosis, urolithiasis (renal lithiasis, nephrolithiasis), reflux nephropathy, urinary tract infections, urinary retention, and acute or chronic unilateral obstructive uropathy.)

[0611] In addition, compositions of the invention can be used to diagnose, prognose, prevent, and/or treat metabolic and congenital disorders of the kidney (e.g., uremia, renal amyloidosis, renal osteodystrophy, renal tubular acidosis, renal glycosuria, nephrogenic diabetes insipidus, cystinuria, Fanconi's syndrome, renal fibrocystic osteosis (renal rickets), Hartnup disease, Bartter's syndrome, Liddle's syndrome, polycystic kidney disease, medullary cystic disease, medullary sponge kidney, Alport's syndrome, nail-patella syndrome, congenital nephrotic syndrome, CRUSH syndrome, horseshoe kidney, diabetic nephropathy, nephrogenic diabetes insipidus, analgesic nephropathy, kidney stones, and membranous nephropathy), and autoimmune disorders of the kidney (e.g., systemic lupus erythematosus (SLE), Goodpasture syndrome, IgA nephropathy, and IgM mesangial proliferative glomerulonephritis).

[0612] Compositions of the invention can also be used to diagnose, prognose, prevent, and/or treat sclerotic or necrotic disorders of the kidney (e.g., glomerulosclerosis, diabetic nephropathy, focal segmental glomerulosclerosis (FSGS), necrotizing glomerulonephritis, and renal papillary necrosis), cancers of the kidney (e.g., nephroma, hypernephroma, nephroblastoma, renal cell cancer, transitional cell cancer, renal adenocarcinoma, squamous cell cancer, and Wilm's tumor), and electrolyte imbalances (e.g., nephrocalcinosis, pyuria, edema, hydronephritis, proteinuria, hyponatremia, hypernatremia, hypokalemia, hyperkalemia, hypocalcemia, hypercalcemia, hypophosphatemia, and hyperphosphatemia).

[0613] Polypeptides may be administered using any method known in the art, including, but not limited to, direct needle injection at the delivery site, intravenous injection, topical administration, catheter infusion, biolistic injectors, particle accelerators, gelfoam sponge depots, other commercially available depot materials, osmotic pumps, oral or suppositorial solid pharmaceutical-formulations, decanting or topical applications during surgery, aerosol delivery. Such methods are known in the art. Polypeptides may be administered as part of a Therapeutic, described in more detail below. Methods of delivering polynucleotides are described in more detail herein.

[0614] Cardiovascular Disorders

[0615] Polynucleotides or polypeptides, or agonists or antagonists of the present invention, may be used to treat, prevent, diagnose, and/or prognose cardiovascular disorders, including, but not limited to, peripheral artery disease, such as limb ischemia.

[0616] Cardiovascular disorders include, but are not limited to, cardiovascular abnormalities, such as arterio-arterial fistula, arteriovenous fistula, cerebral arteriovenous malformations, congenital heart defects, pulmonary atresia, and Scimitar Syndrome. Congenital heart defects include, but are not limited to, aortic coarctation, cor triatriatum, coronary vessel anomalies, crisscross heart, dextrocardia, patent ductus arteriosus, Ebstein's anomaly, Eisenmenger complex, hypoplastic left heart syndrome, levocardia, tetralogy of fallot, transposition of great vessels, double outlet right ventricle, tricuspid atresia, persistent truncus arteriosus, and heart septal defects, such as aortopulmonary septal defect, endocardial cushion defects, Lutembacher's Syndrome, trilogy of Fallot, ventricular heart septal defects.

[0617] Cardiovascular disorders also include, but are not limited to, heart disease, such as arrhythmias, carcinoid heart disease, high cardiac output, low cardiac output, cardiac tamponade, endocarditis (including bacterial), heart aneurysm, cardiac arrest, congestive heart failure, congestive cardiomyopathy, paroxysmal dyspnea, cardiac edema, heart hypertrophy, congestive cardiomyopathy, left ventricular hypertrophy, right ventricular hypertrophy, post-infarction heart rupture, ventricular septal rupture, heart valve diseases, myocardial diseases, myocardial ischemia, pericardial effusion, pericarditis (including constrictive and tuberculous), pneumopericardium, postpericardiotomy syndrome, pulmonary heart disease, rheumatic heart disease, ventricular dysfunction, hyperemia, cardiovascular pregnancy complications, Scimitar Syndrome, cardiovascular syphilis, and cardiovascular tuberculosis.

[0618] Arrhythmias include, but are not limited to, sinus arrhythmia, atrial fibrillation, atrial flutter, bradycardia, extrasystole, Adams-Stokes Syndrome, bundle-branch block, sinoatrial block, long QT syndrome, parasystole, Lown-Ganong-Levine Syndrome, Mahaim-type pre-excitation syndrome, Wolff-Parkinson-White syndrome, sick sinus syndrome, tachycardias, and ventricular fibrillation. Tachycardias include paroxysmal tachycardia, supraventricular tachycardia, accelerated idioventricular rhythm, atrioventricular nodal reentry tachycardia, ectopic atrial tachycardia, ectopic junctional tachycardia, sinoatrial nodal reentry tachycardia, sinus tachycardia, Torsades de Pointes, and ventricular tachycardia.

[0619] Heart valve diseases include, but are not limited to, aortic valve insufficiency, aortic valve stenosis, hear murmurs, aortic valve prolapse, mitral valve prolapse, tricuspid valve prolapse, mitral valve insufficiency, mitral valve stenosis, pulmonary atresia, pulmonary valve insufficiency, pulmonary valve stenosis, tricuspid atresia, tricuspid valve insufficiency, and tricuspid valve stenosis.

[0620] Myocardial diseases include, but are not limited to, alcoholic cardiomyopathy, congestive cardiomyopathy, hypertrophic cardiomyopathy, aortic subvalvular stenosis, pulmonary subvalvular stenosis, restrictive cardiomyopathy, Chagas cardiomyopathy, endocardial fibroelastosis, endomyocardial fibrosis, Kearns Syndrome, myocardial reperfusion injury, and myocarditis.

[0621] Myocardial ischemias include, but are not limited to, coronary disease, such as angina pectoris, coronary aneurysm, coronary arteriosclerosis, coronary thrombosis, coronary vasospasm, myocardial infarction and myocardial stunning.

[0622] Cardiovascular diseases also include vascular diseases such as aneurysms, angiodysplasia, angiomatosis, bacillary angiomatosis, Hippel-Lindau Disease, Klippel-Trenaunay-Weber Syndrome, Sturge-Weber Syndrome, angioneurotic edema, aortic diseases, Takayasu's Arteritis, aortitis, Leriche's Syndrome, arterial occlusive diseases, arteritis, enarteritis, polyarteritis nodosa, cerebrovascular disorders, diabetic angiopathies, diabetic retinopathy, embolisms, thrombosis, erythromelalgia, hemorrhoids, hepatic veno-occlusive disease, hypertension, hypotension, ischemia, peripheral vascular diseases, phlebitis, pulmonary veno-occlusive disease, Raynaud's disease, CREST syndrome, retinal vein occlusion, Scimitar syndrome, superior vena cava syndrome, telangiectasia, atacia telangiectasia, hereditary hemorrhagic telangiectasia, varicocele, varicose veins, varicose ulcer, vasculitis, and venous insufficiency.

[0623] Aneurysms include, but are not limited to, dissecting aneurysms, false aneurysms, infected aneurysms, ruptured aneurysms, aortic aneurysms, cerebral aneurysms, coronary aneurysms, heart aneurysms, and iliac aneurysms.

[0624] Arterial occlusive diseases include, but are not limited to, arteriosclerosis, intermittent claudication, carotid stenosis, fibromuscular dysplasias, mesenteric vascular occlusion, Moyamoya disease, renal artery obstruction, retinal artery occlusion, and thromboangiitis obliterans.

[0625] Cerebrovascular disorders include, but are not limited to, carotid artery diseases, cerebral amyloid angiopathy, cerebral aneurysm, cerebral anoxia, cerebral arteriosclerosis, cerebral arteriovenous malformation, cerebral artery diseases, cerebral embolism and thrombosis, carotid artery thrombosis, sinus thrombosis, Wallenberg's syndrome, cerebral hemorrhage, epidural hematoma, subdural hematoma, subaraxhnoid hemorrhage, cerebral infarction, cerebral ischemia (including transient), subclavian steal syndrome, periventricular leukomalacia, vascular headache, cluster headache, migraine, and vertebrobasilar insufficiency.

[0626] Embolisms include, but are not limited to, air embolisms, amniotic fluid embolisms, cholesterol embolisms, blue toe syndrome, fat embolisms, pulmonary embolisms, and thromoboembolisms. Thrombosis include, but are not limited to, coronary thrombosis, hepatic vein thrombosis, retinal vein occlusion, carotid artery thrombosis, sinus thrombosis, Wallenberg's syndrome, and thrombophlebitis.

[0627] Ischemic disorders include, but are not limited to, cerebral ischemia, ischemic colitis, compartment syndromes, anterior compartment syndrome, myocardial ischemia, reperfusion injuries, and peripheral limb ischemia. Vasculitis includes, but is not limited to, aortitis, arteritis, Behcet's Syndrome, Churg-Strauss Syndrome, mucocutaneous lymph node syndrome, thromboangiitis obliterans, hypersensitivity vasculitis, Schoenlein-Henoch purpura, allergic cutaneous vasculitis, and Wegener's granulomatosis.

[0628] Polypeptides may be administered using any method known in the art, including, but not limited to, direct needle injection at the delivery site, intravenous injection, topical administration, catheter infusion, biolistic injectors, particle accelerators, gelfoam sponge depots, other commercially available depot materials, osmotic pumps, oral or suppositorial solid pharmaceutical formulations, decanting or topical applications during surgery, aerosol delivery. Such methods are known in the art. Polypeptides may be administered as part of a Therapeutic, described in more detail below. Methods of delivering polynucleotides are described in more detail herein.

[0629] Respiratory Disorders

[0630] Polynucleotides or polypeptides, or agonists or antagonists of the present invention may be used to treat, prevent, diagnose, and/or prognose diseases and/or disorders of the respiratory system.

[0631] Diseases and disorders of the respiratory system include, but are not limited to, nasal vestibulitis, nonallergic rhinitis (e.g., acute rhinitis, chronic rhinitis, atrophic rhinitis, vasomotor rhinitis), nasal polyps, and sinusitis, juvenile angiofibromas, cancer of the nose and juvenile papillomas, vocal cord polyps, nodules (singer's nodules), contact ulcers, vocal cord paralysis, laryngoceles, pharyngitis (e.g., viral and bacterial), tonsillitis, tonsillar cellulitis, parapharyngeal abscess, laryngitis, laryngoceles, and throat cancers (e.g., cancer of the nasopharynx, tonsil cancer, larynx cancer), lung cancer (e.g., squamous cell carcinoma, small cell (oat cell) carcinoma, large cell carcinoma, and adenocarcinoma), allergic disorders (eosinophilic pneumonia, hypersensitivity pneumonitis (e.g., extrinsic allergic alveolitis, allergic interstitial pneumonitis, organic dust pneumoconiosis, allergic bronchopulmonary aspergillosis, asthma, Wegener's granulomatosis (granulomatous vasculitis), Goodpasture's syndrome)), pneumonia (e.g., bacterial pneumonia (e.g., Streptococcus pneumoniae (pneumoncoccal pneumonia), Staphylococcus aureus (staphylococcal pneumonia), Gram-negative bacterial pneumonia (caused by, e.g., Klebsiella and Pseudomas spp.), Mycoplasma pneumoniae pneumonia, Hemophilus influenzae pneumonia, Legionella pneumophila (Legionnaires' disease), and Chlamydia psittaci (Psittacosis)), and viral pneumonia (e.g., influenza, chickenpox (varicella).

[0632] Additional diseases and disorders of the respiratory system include, but are not limited to bronchiolitis, polio (poliomyelitis), croup, respiratory syncytial viral infection, mumps, erythema infectiosum (fifth disease), roseola infantum, progressive rubella panencephalitis, german measles, and subacute sclerosing panencephalitis), fungal pneumonia (e.g., Histoplasmosis, Coccidioidomycosis, Blastomycosis, fungal infections in people with severely suppressed immune systems (e.g., cryptococcosis, caused by Cryptococcus neoformans; aspergillosis, caused by Aspergillus spp.; candidiasis, caused by Candida; and mucormycosis)), Pneumocystis carinii (pneumocystis pneumonia), atypical pneumonias (e.g., Mycoplasma and Chlamydia spp.), opportunistic infection pneumonia, nosocomial pneumonia, chemical pneumonitis, and aspiration pneumonia, pleural disorders (e.g., pleurisy, pleural effusion, and pneumothorax (e.g., simple spontaneous pneumothorax, complicated spontaneous pneumothorax, tension pneumothorax)), obstructive airway diseases (e.g., asthma, chronic obstructive pulmonary disease (COPD), emphysema, chronic or acute bronchitis), occupational lung diseases (e.g., silicosis, black lung (coal workers' pneumoconiosis), asbestosis, berylliosis, occupational asthsma, byssinosis, and benign pneumoconioses), Infiltrative Lung Disease (e.g., pulmonary fibrosis (e.g., fibrosing alveolitis, usual interstitial pneumonia), idiopathic pulmonary fibrosis, desquamative interstitial pneumonia, lymphoid interstitial pneumonia, histiocytosis X (e.g., Letterer-Siwe disease, Hand-Schüller-Christian disease, eosinophilic granuloma), idiopathic pulmonary hemosiderosis, sarcoidosis and pulmonary alveolar proteinosis), Acute respiratory distress syndrome (also called, e.g., adult respiratory distress syndrome), edema, pulmonary embolism, bronchitis (e.g., viral, bacterial), bronchiectasis, atelectasis, lung abscess (caused by, e.g., Staphylococcus aureus or Legionella pneumophila), and cystic fibrosis.

[0633] Anti-Angiogenesis Activity

[0634] The naturally occurring balance between endogenous stimulators and inhibitors of angiogenesis is one in which inhibitory influences predominate. Rastinejad et al, Cell 56:345-355 (1989). In those rare instances in which neovascularization occurs under normal physiological conditions, such as wound healing, organ regeneration, embryonic development, and female reproductive processes, angiogenesis is stringently regulated and spatially and temporally delimited. Under conditions of pathological angiogenesis such as that characterizing solid tumor growth, these regulatory controls fail. Unregulated angiogenesis becomes pathologic and sustains progression of many neoplastic and non-neoplastic diseases. A number of serious diseases are dominated by abnormal neovascularization including solid tumor growth and metastases, arthritis, some types of eye disorders, and psoriasis. See, e.g., reviews by Moses et al., Biotech. 9:630-634 (1991); Folkman et al., N. Engl. J. Med., 333:1757-1763 (1995); Auerbach et al., J. Microvasc. Res. 29:401-411 (1985); Folkman, Advances in Cancer Research, eds. Klein and Weinhouse, Academic Press, New York, pp. 175-203 (1985); Patz, Am. J. Opthalmol. 94:715-743 (1982); and Folkman et al., Science 221:719-725 (1983). In a number of pathological conditions, the process of angiogenesis contributes to the disease state. For example, significant data have accumulated which suggest that the growth of solid tumors is dependent on angiogenesis. Folkman and Klagsbrun, Science 235:442-447 (1987).

[0635] The present invention provides for treatment of diseases or disorders associated with neovascularization by administration of the polynucleotides and/or polypeptides of the invention, as well as agonists or antagonists of the present invention. Malignant and metastatic conditions which can be treated with the polynucleotides and polypeptides, or agonists or antagonists of the invention include, but are not limited to, malignancies, solid tumors, and cancers described herein and otherwise known in the art (for a review of such disorders, see Fishman et al., Medicine, 2d Ed., J. B. Lippincott Co., Philadelphia (1985)).Thus, the present invention provides a method of treating an angiogenesis-related disease and/or disorder, comprising administering to an individual in need thereof a therapeutically effective amount of a polynucleotide, polypeptide, antagonist and/or agonist of the invention. For example, polynucleotides, polypeptides, antagonists and/or agonists may be utilized in a variety of additional methods in order to therapeutically treat a cancer or tumor. Cancers which may be treated with polynucleotides, polypeptides, antagonists and/or agonists include, but are not limited to solid tumors, including prostate, lung, breast, ovarian, stomach, pancreas, larynx, esophagus, testes, liver, parotid, biliary tract, colon, rectum, cervix, uterus, endometrium, kidney, bladder, thyroid cancer; primary tumors and metastases; melanomas; glioblastoma; Kaposi's sarcoma; leiomyosarcoma; non-small cell lung cancer; colorectal cancer; advanced malignancies; and blood born tumors such as leukemias. For example, polynucleotides, polypeptides, antagonists and/or agonists may be delivered topically, in order to treat cancers such as skin cancer, head and neck tumors, breast tumors, and Kaposi's sarcoma.

[0636] Within yet other aspects, polynucleotides, polypeptides, antagonists and/or agonists may be utilized to treat superficial forms of bladder cancer by, for example, intravesical administration. Polynucleotides, polypeptides, antagonists and/or agonists may be delivered directly into the tumor, or near the tumor site, via injection or a catheter. Of course, as the artisan of ordinary skill will appreciate, the appropriate mode of administration will vary according to the cancer to be treated. Other modes of delivery are discussed herein.

[0637] Polynucleotides, polypeptides, antagonists and/or agonists may be useful in treating other disorders, besides cancers, which involve angiogenesis. These disorders include, but are not limited to: benign tumors, for example hemangiomas, acoustic neuromas, neurofibromas, trachomas, and pyogenic granulomas; artheroscleric plaques; ocular angiogenic diseases, for example, diabetic retinopathy, retinopathy of prematurity, macular degeneration, corneal graft rejection, neovascular glaucoma, retrolental fibroplasia, rubeosis, retinoblastoma, uvietis and Pterygia (abnormal blood vessel growth) of the eye; rheumatoid arthritis; psoriasis; delayed wound healing; endometriosis; vasculogenesis; granulations; hypertrophic scars (keloids); nonunion fractures; scleroderma; trachoma; vascular adhesions; myocardial angiogenesis; coronary collaterals; cerebral collaterals; arteriovenous malformations; ischemic limb angiogenesis; Osler-Webber Syndrome; plaque neovascularization; telangiectasia; hemophiliac joints; angiofibroma; fibromuscular dysplasia; wound granulation; Crohn's disease; and atherosclerosis.

[0638] For example, within one aspect of the present invention methods are provided for treating hypertrophic scars and keloids, comprising the step of administering a polynucleotide, polypeptide, antagonist and/or agonist of the invention to a hypertrophic scar or keloid.

[0639] Within one embodiment of the present invention polynucleotides, polypeptides, antagonists and/or agonists of the invention are directly injected into a hypertrophic scar or keloid, in order to prevent the progression of these lesions. This therapy is of particular value in the prophylactic treatment of conditions which are known to result in the development of hypertrophic scars and keloids (e.g., bums), and is preferably initiated after the proliferative phase has had time to progress (approximately 14 days after the initial injury), but before hypertrophic scar or keloid development. As noted above, the present invention also provides methods for treating neovascular diseases of the eye, including for example, corneal neovascularization, neovascular glaucoma, proliferative diabetic retinopathy, retrolental fibroplasia and macular degeneration.

[0640] Moreover, Ocular disorders associated with neovascularization which can be treated with the polynucleotides and polypeptides of the present invention (including agonists and/or antagonists) include, but are not limited to: neovascular glaucoma, diabetic retinopathy, retinoblastoma, retrolental fibroplasia, uveitis, retinopathy of prematurity macular degeneration, comeal graft neovascularization, as well as other eye inflammatory diseases, ocular tumors and diseases associated with choroidal or iris neovascularization. See, e.g., reviews by Waltman et al., Am. J. Ophthal. 85:704-710 (1978) and Gartner et al., Surv. Ophthal 22:291-312 (1978).

[0641] Thus, within one aspect of the present invention methods are provided for treating neovascular diseases of the eye such as corneal neovascularization (including corneal graft neovascularization), comprising the step of administering to a patient a therapeutically effective amount of a compound (as described above) to the cornea, such that the formation of blood vessels is inhibited. Briefly, the cornea is a tissue which normally lacks blood vessels. In certain pathological conditions however, capillaries may extend into the cornea from the pericorneal vascular plexus of the limbus. When the cornea becomes vascularized, it also becomes clouded, resulting in a decline in the patient's visual acuity. Visual loss may become complete if the cornea completely opacitates. A wide variety of disorders can result in corneal neovascularization, including for example, corneal infections (e.g., trachoma, herpes simplex keratitis, leishmaniasis and onchocerciasis), immunological processes (e.g., graft rejection and Stevens-Johnson's syndrome), alkali burns, trauma, inflammation (of any cause), toxic and nutritional deficiency states, and as a complication of wearing contact lenses.

[0642] Within particularly preferred embodiments of the invention, may be prepared for topical administration in saline (combined with any of the preservatives and antimicrobial agents commonly used in ocular preparations), and administered in eyedrop form. The solution or suspension may be prepared in its pure form and administered several times daily. Alternatively, anti-angiogenic compositions, prepared as described above, may also be administered directly to the cornea. Within preferred embodiments, the anti-angiogenic composition is prepared with a muco-adhesive polymer which binds to cornea. Within further embodiments, the anti-angiogenic factors or anti-angiogenic compositions may be utilized as an adjunct to conventional steroid therapy. Topical therapy may also be useful prophylactically in corneal lesions which are known to have a high probability of inducing an angiogenic response (such as chemical burns). In these instances the treatment, likely in combination with steroids, may be instituted immediately to help prevent subsequent complications.

[0643] Within other embodiments, the compounds described above may be injected directly into the corneal stroma by an ophthalmologist under microscopic guidance. The preferred site of injection may vary with the morphology of the individual lesion, but the goal of the administration would be to place the composition at the advancing front of the vasculature (i.e., interspersed between the blood vessels and the normal cornea). In most cases this would involve perilimbic corneal injection to “protect” the cornea from the advancing blood vessels. This method may also be utilized shortly after a corneal insult in order to prophylactically prevent corneal neovascularization. In this situation the material could be injected in the perilimbic cornea interspersed between the corneal lesion and its undesired potential limbic blood supply. Such methods may also be utilized in a similar fashion to prevent capillary invasion of transplanted corneas. In a sustained-release form injections might only be required 2-3 times per year. A steroid could also be added to the injection solution to reduce inflammation resulting from the injection itself.

[0644] Within another aspect of the present invention, methods are provided for treating neovascular glaucoma, comprising the step of administering to a patient a therapeutically effective amount of a polynucleotide, polypeptide, antagonist and/or agonist to the eye, such that the formation of blood vessels is inhibited. In one embodiment, the compound may be administered topically to the eye in order to treat early forms of neovascular glaucoma. Within other embodiments, the compound may be implanted by injection into the region of the anterior chamber angle. Within other embodiments, the compound may also be placed in any location such that the compound is continuously released into the aqueous humor. Within another aspect of the present invention, methods are provided for treating proliferative diabetic retinopathy, comprising the step of administering to a patient a therapeutically effective amount of a polynucleotide, polypeptide, antagonist and/or agonist to the eyes, such that the formation of blood vessels is inhibited.

[0645] Within particularly preferred embodiments of the invention, proliferative diabetic retinopathy may be treated by injection into the aqueous humor or the vitreous, in order to increase the local concentration of the polynucleotide, polypeptide, antagonist and/or agonist in the retina. Preferably, this treatment should be initiated prior to the acquisition of severe disease requiring photocoagulation.

[0646] Within another aspect of the present invention, methods are provided for treating retrolental fibroplasia, comprising the step of administering to a patient a therapeutically effective amount of a polynucleotide, polypeptide, antagonist and/or agonist to the eye, such that the formation of blood vessels is inhibited. The compound may be administered topically, via intravitreous injection and/or via intraocular implants.

[0647] Additionally, disorders which can be treated with the polynucleotides, polypeptides, agonists and/or agonists include, but are not limited to, hemangioma, arthritis, psoriasis, angiofibroma, atherosclerotic plaques, delayed wound healing, granulations, hemophilic joints, hypertrophic scars, nonunion fractures, Osler-Weber syndrome, pyogenic granuloma, scleroderma, trachoma, and vascular adhesions.

[0648] Moreover, disorders and/or states, which can be treated, prevented, diagnosed, and/or prognosed with the the polynucleotides, polypeptides, agonists and/or agonists of the invention include, but are not limited to, solid tumors, blood born tumors such as leukemias, tumor metastasis, Kaposi's sarcoma, benign tumors, for example hemangiomas, acoustic neuromas, neurofibromas, trachomas, and pyogenic granulomas, rheumatoid arthritis, psoriasis, ocular angiogenic diseases, for example, diabetic retinopathy, retinopathy of prematurity, macular degeneration, corneal graft rejection, neovascular glaucoma, retrolental fibroplasia, rubeosis, retinoblastoma, and uvietis, delayed wound healing, endometriosis, vascluogenesis, granulations, hypertrophic scars (keloids), nonunion fractures, scleroderma, trachoma, vascular adhesions, myocardial angiogenesis, coronary collaterals, cerebral collaterals, arteriovenous malformations, ischemic limb angiogenesis, Osler-Webber Syndrome, plaque neovascularization, telangiectasia, hemophiliac joints, angiofibroma fibromuscular dysplasia, wound granulation, Crohn's disease, atherosclerosis, birth control agent by preventing vascularization required for embryo implantation controlling menstruation, diseases that have angiogenesis as a pathologic consequence such as cat scratch disease (Rochele minalia quintosa), ulcers (Helicobacter pylori), Bartonellosis and bacillary angiomatosis.

[0649] In one aspect of the birth control method, an amount of the compound sufficient to block embryo implantation is administered before or after intercourse and fertilization have occurred, thus providing an effective method of birth control, possibly a “morning after” method. Polynucleotides, polypeptides, agonists and/or agonists may also be used in controlling menstruation or administered as either a peritoneal lavage fluid or for peritoneal implantation in the treatment of endometriosis.

[0650] Polynucleotides, polypeptides, agonists and/or agonists of the present invention may be incorporated into surgical'sutures in order to prevent stitch granulomas.

[0651] Polynucleotides, polypeptides, agonists and/or agonists may be utilized in a wide variety of surgical procedures. For example, within one aspect of the present invention a compositions (in the form of, for example, a spray or film) may be utilized to coat or spray an area prior to removal of a tumor, in order to isolate normal surrounding tissues from malignant tissue, and/or to prevent the spread of disease to surrounding tissues. Within other aspects of the present invention, compositions (e.g., in the form of a spray) may be delivered via endoscopic procedures in order to coat tumors, or inhibit angiogenesis in a desired locale. Within yet other aspects of the present invention, surgical meshes which have been coated with anti-angiogenic compositions of the present invention may be utilized in any procedure wherein a surgical mesh might be utilized. For example, within one embodiment of the invention a surgical mesh laden with an anti-angiogenic composition may be utilized during abdominal cancer resection surgery (e.g., subsequent to colon resection) in order to provide support to the structure, and to release an amount of the anti-angiogenic factor.

[0652] Within further aspects of the present invention, methods are provided for treating tumor excision sites, comprising administering a polynucleotide, polypeptide, agonist and/or agonist to the resection margins of a tumor subsequent to excision, such that the local recurrence of cancer and the formation of new blood vessels at the site is inhibited. Within one embodiment of the invention, the anti-angiogenic compound is administered directly to the tumor excision site (e.g., applied by swabbing, brushing or otherwise coating the resection margins of the tumor with the anti-angiogenic compound). Alternatively, the anti-angiogenic compounds may be incorporated into known surgical pastes prior to administration. Within particularly preferred embodiments of the invention, the anti-angiogenic compounds are applied after hepatic resections for malignancy, and after neurosurgical operations.

[0653] Within one aspect of the present invention, polynucleotides, polypeptides, agonists and/or agonists may be administered to the resection margin of a wide variety of tumors, including for example, breast, colon, brain and hepatic tumors. For example, within one embodiment of the invention, anti-angiogenic compounds may be administered to the site of a neurological tumor subsequent to excision, such that the formation of new blood vessels at the site are inhibited.

[0654] The polynucleotides, polypeptides, agonists and/or agonists of the present invention may also be administered along with other anti-angiogenic factors. Representative examples of other anti-angiogenic factors include: Anti-Invasive Factor, retinoic acid and derivatives thereof, paclitaxel, Suramin, Tissue Inhibitor of Metalloproteinase-1, Tissue Inhibitor of Metalloproteinase-2, Plasminogen Activator Inhibitor-1, Plasminogen Activator Inhibitor-2, and various forms of the lighter “d group” transition metals.

[0655] Lighter “d group” transition metals include, for example, vanadium, molybdenum, tungsten, titanium, niobium, and tantalum species. Such transition metal species may form transition metal complexes. Suitable complexes of the above-mentioned transition metal species include oxo transition metal complexes.

[0656] Representative examples of vanadium complexes include oxo vanadium complexes such as vanadate and vanadyl complexes. Suitable vanadate complexes include metavanadate and orthovanadate complexes such as, for example, ammonium metavanadate, sodium metavanadate, and sodium orthovanadate. Suitable vanadyl complexes include, for example, vanadyl acetylacetonate and vanadyl sulfate including vanadyl sulfate hydrates such as vanadyl sulfate mono- and trihydrates.

[0657] Representative examples of tungsten and molybdenum complexes also include oxo complexes. Suitable oxo tungsten complexes include tungstate and tungsten oxide complexes. Suitable tungstate complexes include ammonium tungstate, calcium tungstate, sodium tungstate dihydrate, and tungstic acid. Suitable tungsten oxides include tungsten (IV) oxide and tungsten (VI) oxide. Suitable oxo molybdenum complexes include molybdate, molybdenum oxide, and molybdenyl complexes. Suitable molybdate complexes include ammonium molybdate and its hydrates, sodium molybdate and its hydrates, and potassium molybdate and its hydrates. Suitable molybdenum oxides include molybdenum (VI) oxide, molybdenum (VI) oxide, and molybdic acid. Suitable molybdenyl complexes include, for example, molybdenyl acetylacetonate. Other suitable tungsten and molybdenum complexes include hydroxo derivatives derived from, for example, glycerol, tartaric acid, and sugars.

[0658] A wide variety of other anti-angiogenic factors may also be utilized within the context of the present invention. Representative examples include platelet factor 4; protamine sulphate; sulphated chitin derivatives (prepared from queen crab shells), (Murata et al., Cancer Res. 51:22-26, 1991); Sulphated Polysaccharide Peptidoglycan Complex (SP-PG) (the function of this compound may be enhanced by the presence of steroids such as estrogen, and tamoxifen citrate); Staurosporine; modulators of matrix metabolism, including for example, proline analogs, cishydroxyproline, d,L-3,4-dehydroproline, Thiaproline, alpha,alpha-dipyridyl, aminopropionitrile fumarate; 4-propyl-5-(4-pyridinyl)-2(3H)-oxazolone; Methotrexate; Mitoxantrone; Heparin; Interferons; 2 Macroglobulin-serum; ChIMP-3 (Pavloff et al., J. Bio. Chem. 267:17321-17326, 1992); Chymostatin (Tomkinson et al., Biochem J. 286:475-480, 1992); Cyclodextrin Tetradecasulfate; Eponemycin; Camptothecin; Fumagillin (Ingber et al., Nature 348:555-557, 1990); Gold Sodium Thiomalate (“GST”; Matsubara and Ziff, J. Clin. Invest. 79:1440-1446, 1987); anticollagenase-serum; alpha2-antiplasmin (Holmes et al., J. Biol. Chem. 262(4):1659-1664, 1987); Bisantrene (National Cancer Institute); Lobenzarit disodium (N-(2)-carboxyphenyl-4-chloroanthronilic acid disodium or “CCA”; Takeuchi et al., Agents Actions 36:312-316, 1992); Thalidomide; Angostatic steroid; AGM-1470; carboxynaminolmidazole; and metalloproteinase inhibitors such as BB94.

[0659] Diseases at the Cellular Level

[0660] Diseases associated with increased cell survival or the inhibition of apoptosis that could be treated, prevented, diagnosed, and/or prognosed using polynucleotides or polypeptides, as well as antagonists or agonists of the present invention, include cancers (such as follicular lymphomas, carcinomas with p53 mutations, and hormone-dependent tumors, including, but not limited to colon cancer, cardiac tumors, pancreatic cancer, melanoma, retinoblastoma, glioblastoma, lung cancer, intestinal cancer, testicular cancer, stomach cancer, neuroblastoma, myxoma, myoma, lymphoma, endothelioma, osteoblastoma, osteoclastoma, osteosarcoma, chondrosarcoma, adenoma, breast cancer, prostate cancer, Kaposi's sarcoma and ovarian cancer); autoimmune disorders (such as, multiple sclerosis, Sjogren's syndrome, Hashimoto's thyroiditis, biliary cirrhosis, Behcet's disease, Crohn's disease, polymyositis, systemic lupus erythematosus and immune-related glomerulonephritis and rheumatoid arthritis) and viral infections (such as herpes viruses, pox viruses and adenoviruses), inflammation, graft v. host disease, acute graft rejection, and chronic graft rejection.

[0661] In preferred embodiments, polynucleotides, polypeptides, and/or antagonists of the invention are used to inhibit growth, progression, and/or metasis of cancers, in particular those listed above.

[0662] Additional diseases or conditions associated with increased cell survival that could be treated or detected by polynucleotides or polypeptides, or agonists or antagonists of the present invention include, but are not limited to, progression, and/or metastases of malignancies and related disorders such as leukemia (including acute leukemias (e.g., acute lymphocytic leukemia, acute myelocytic leukemia (including myeloblastic, promyelocytic, myelomonocytic, monocytic, and erythroleukemia)) and chronic leukemias (e.g., chronic myelocytic (granulocytic) leukemia and chronic lymphocytic leukemia)), polycythemia vera, lymphomas (e.g., Hodgkin's disease and non-Hodgkin's disease), multiple myeloma, Waldenstrom's macroglobulinemia, heavy chain disease, and solid tumors including, but not limited to, sarcomas and carcinomas such as fibrosarcoma, myxosarcoma, liposarcoma, chondrosarcoma, osteogenic sarcoma, chordoma, angiosarcoma, endotheliosarcoma, lymphangiosarcoma, lymphangioendotheliosarcoma, synovioma, mesothelioma, Ewings tumor, leiomyosarcoma, rhabdomyosarcoma, colon carcinoma, pancreatic cancer, breast cancer, ovarian cancer, prostate cancer, squamous cell carcinoma, basal cell carcinoma, adenocarcinoma, sweat gland carcinoma, sebaceous gland carcinoma, papillary carcinoma, papillary adenocarcinomas, cystadenocarcinoma, medullary carcinoma, bronchogenic carcinoma, renal cell carcinoma, hepatoma, bile duct carcinoma, choriocarcinoma, seminoma, embryonal carcinoma, Wilm's tumor, cervical cancer, testicular tumor, lung carcinoma, small cell lung carcinoma, bladder carcinoma, epithelial carcinoma, glioma, astrocytoma, medulloblastoma, craniopharyngioma, ependymoma, pinealoma, hemangioblastoma, acoustic neuroma, oligodendroglioma, menangioma, melanoma, neuroblastoma, and retinoblastoma.

[0663] Diseases associated with increased apoptosis that could be treated, prevented, diagnosed, and/or prognesed using polynucleotides or polypeptides, as well as agonists or antagonists of the present invention, include, but are not limited to, AIDS; neurodegenerative disorders (such as Alzheimer's disease, Parkinson's disease, Amyotrophic lateral sclerosis, Retinitis pigmentosa, Cerebellar degeneration and brain tumor or prior associated disease); autoimmune disorders (such as, multiple sclerosis, Sjogren's syndrome, Hashimoto's thyroiditis, biliary cirrhosis, Behcet's disease, Crohn's disease, polymyositis, systemic lupus erythematosus and immune-related glomerulonephritis and rheumatoid arthritis) myelodysplastic syndromes (such as aplastic anemia), graft v. host disease, ischemic injury (such as that caused by myocardial infarction, stroke and reperfusion injury), liver injury (e.g., hepatitis related liver injury, ischemia/reperfusion injury, cholestosis (bile duct injury) and liver cancer); toxin-induced liver disease (such as that caused by alcohol), septic shock, cachexia and anorexia.

[0664] Wound Healing and Epithelial Cell Proliferation

[0665] In accordance with yet a further aspect of the present invention, there is provided a process for utilizing polynucleotides or polypeptides, as well as agonists or antagonists of the present invention, for therapeutic purposes, for example, to stimulate epithelial cell proliferation and basal keratinocytes for the purpose of wound healing, and to stimulate hair follicle production and healing of dermal wounds. Polynucleotides or polypeptides, as well as agonists or antagonists of the present invention, may be clinically useful in stimulating wound healing including surgical wounds, excisional wounds, deep wounds involving damage of the dermis and epidermis, eye tissue wounds, dental tissue wounds, oral cavity wounds, diabetic ulcers, dermal ulcers, cubitus ulcers, arterial ulcers, venous stasis ulcers, burns resulting from heat exposure or chemicals, and other abnormal wound healing conditions such as uremia, malnutrition, vitamin deficiencies and complications associated with systemic treatment with steroids, radiation therapy and antineoplastic drugs and antimetabolites. Polynucleotides or polypeptides, as well as agonists or antagonists of the present invention, could be used to promote dermal reestablishment subsequent to dermal loss

[0666] Polynucleotides or polypeptides, as well as agonists or antagonists of the present invention, could be used to increase the adherence of skin grafts to a wound bed and to stimulate re-epithelialization from the wound bed. The following are types of grafts that polynucleotides or polypeptides, agonists or antagonists of the present invention, could be used to increase adherence to a wound bed: autografts, artificial skin, allografts, autodermic graft, autoepdermic grafts, avacular grafts, Blair-Brown grafts, bone graft, brephoplastic grafts, cutis graft, delayed graft, dermic graft, epidermic graft, fascia graft, full thickness graft, heterologous graft, xenograft, homologous graft, hyperplastic graft, lamellar graft, mesh graft, mucosal graft, Ollier-Thiersch graft, omenpal graft, patch graft, pedicle graft, penetrating graft, split skin graft, thick split graft. Polynucleotides or polypeptides, as well as agonists or antagonists of the present invention, can be used to promote skin strength and to improve the appearance of aged skin.

[0667] It is believed that polynucleotides or polypeptides, as well as agonists or antagonists of the present invention, will also produce changes in hepatocyte proliferation, and epithelial cell proliferation in the lung, breast, pancreas, stomach, small intestine, and large intestine. Polynucleotides or polypeptides, as well as agonists or antagonists of the present invention, could promote proliferation of epithelial cells such as sebocytes, hair follicles, hepatocytes, type II pneumocytes, mucin-producing goblet cells, and other epithelial cells and their progenitors contained within the skin, lung, liver, and gastrointestinal tract. Pblynucleotides or polypeptides, agonists or antagonists of the present invention, may promote proliferation of endothelial cells, keratinocytes, and basal keratinocytes.

[0668] Polynucleotides or polypeptides, as well as agonists or antagonists of the present invention, could also be used to reduce the side effects of gut toxicity that result from radiation, chemotherapy treatments or viral infections. Polynucleotides or polypeptides, as well as agonists or antagonists of the present invention, may have a cytoprotective effect on the small intestine mucosa. Polynucleotides or polypeptides, as well as agonists or antagonists of the present invention, may also stimulate healing of mucositis (mouth ulcers) that result from chemotherapy and viral infections.

[0669] Polynucleotides or polypeptides, as well as agonists or antagonists of the present invention, could further be used in full regeneration of skin in full and partial thickness skin defects, including burns, (i.e., repopulation of hair follicles, sweat glands, and sebaceous glands), treatment of other skin defects such as psoriasis. Polynucleotides or polypeptides, as well as agonists or antagonists of the present invention, could be used to treat epidermolysis bullosa, a defect in adherence of the epidermis to the underlying dermis which results in frequent, open and painful blisters by accelerating reepithelialization of these lesions. Polynucleotides or polypeptides, as well as agonists or antagonists of the present invention, could also be used to treat gastric and doudenal ulcers and help heal by scar formation of the mucosal lining and regeneration of glandular mucosa and duodenal mucosal lining more rapidly. Inflammatory bowel diseases, such as Crohn's disease and ulcerative colitis, are diseases which result in destruction of the mucosal surface of the small or large intestine, respectively. Thus, polynucleotides or polypeptides, as well as agonists or antagonists of the present invention, could be used to promote the resurfacing of the mucosal surface to aid more rapid healing and to prevent progression of inflammatory bowel disease. Treatment with polynucleotides or polypeptides, agonists or antagonists of the present invention, is expected to have a significant effect on the production of mucus throughout the gastrointestinal tract and could be used to protect the intestinal mucosa from injurious substances that are ingested or following surgery. Polynucleotides or polypeptides, as well as agonists or antagonists of the present invention, could be used to treat diseases associate with the under expression.

[0670] Moreover, polynucleotides or polypeptides, as well as agonists or antagonists of the present invention, could be used to prevent and heal damage to the lungs due to various pathological states. Polynucleotides or polypeptides, as well as agonists or antagonists of the present invention, which could stimulate proliferation and differentiation and promote the repair of alveoli and brochiolar epithelium to prevent or treat acute or chronic lung damage. For example, emphysema, which results in the progressive loss of aveoli, and inhalation injuries, i.e., resulting from smoke inhalation and bums, that cause necrosis of the bronchiolar epithelium and alveoli could be effectively treated using polynucleotides or polypeptides, agonists or antagonists of the present invention. Also, polynucleotides or polypeptides, as well as agonists or antagonists of the present invention, could be used to stimulate the proliferation of and differentiation of type II pneumocytes, which may help treat or prevent disease such as hyaline membrane diseases, such as infant respiratory distress syndrome and bronchopulmonary displasia, in premature infants.

[0671] Polynucleotides or polypeptides, as well as agonists or antagonists of the present invention, could stimulate the proliferation and differentiation of hepatocytes and, thus, could be used to alleviate or treat liver diseases and pathologies such as fulminant liver failure caused by cirrhosis, liver damage caused by viral hepatitis and toxic substances (i.e., acetaminophen, carbon tetraholoride and other hepatotoxins known in the art).

[0672] In addition, polynucleotides or polypeptides, as well as agonists or antagonists of the present invention, could be used treat or prevent the onset of diabetes mellitus. In patients with newly diagnosed Types I and II diabetes, where some islet cell function remains, polynucleotides or polypeptides, as well as agonists or antagonists of the present invention, could be used to maintain the islet function so as to alleviate, delay or prevent permanent manifestation of the disease. Also, polynucleotides or polypeptides, as well as agonists or antagonists of the present invention, could be used as an auxiliary in islet cell transplantation to improve or promote islet cell function.

[0673] Neural Activity and Neurological Diseases

[0674] The polynucleotides, polypeptides and agonists or antagonists of the invention may be used for the diagnosis and/or treatment of diseases, disorders, damage or injury of the brain and/or nervous system. Nervous system disorders that can be treated with the compositions of the invention (e.g., polypeptides, polynucleotides, and/or agonists or antagonists), include, but are not limited to, nervous system injuries, and diseases or disorders which result in either a disconnection of axons, a diminution or degeneration of neurons, or demyelination. Nervous system lesions which may be treated in a patient (including human and non-human mammalian patients) according to the methods of the invention, include but are not limited to, the following lesions of either the central (including spinal cord, brain) or peripheral nervous systems: (1) ischemic lesions, in which a lack of oxygen in a portion of the nervous system results in neuronal injury or death, including cerebral infarction or ischemia, or spinal cord infarction or ischemia; (2) traumatic lesions, including lesions caused by physical injury or associated with surgery, for example, lesions which sever a portion of the nervous system, or compression injuries; (3) malignant lesions, in which a portion of the nervous system is destroyed or injured by malignant tissue which is either a nervous system associated malignancy or a malignancy derived from non-nervous system tissue; (4) infectious lesions, in which a portion of the nervous system is destroyed or injured as a result of infection, for example, by an abscess or associated with infection by human immunodeficiency virus, herpes zoster, or herpes simplex virus or with Lyme disease, tuberculosis, or syphilis; (5) degenerative lesions, in which a portion of the nervous system is destroyed or injured as a result of a degenerative process including but not limited to, degeneration associated with Parkinson's disease, Alzheimer's disease, Huntington's chorea, or amyotrophic lateral sclerosis (ALS); (6) lesions associated with nutritional diseases or disorders, in which a portion of the nervous system is destroyed or injured by a nutritional disorder or disorder of metabolism including, but not limited to, vitamin B 12 deficiency, folic acid deficiency, Wernicke disease, tobacco-alcohol amblyopia, Marchiafava-Bignami disease (primary degeneration of the corpus callosum), and alcoholic cerebellar degeneration; (7) neurological lesions associated with systemic diseases including, but not limited to, diabetes (diabetic neuropathy, Bell's palsy), systemic lupus erythematosus, carcinoma, or sarcoidosis; (8) lesions caused by toxic substances including alcohol, lead, or particular neurotoxins; and (9) demyelinated lesions in which a portion of the nervous system is destroyed or injured by a demyelinating disease including, but not limited to, multiple sclerosis, human immunodeficiency virus-associated myelopathy, transverse myelopathy or various etiologies, progressive multifocal leukoencephalopathy, and central pontine myelinolysis.

[0675] In one embodiment, the polypeptides, polynucleotides, or agonists or antagonists of the invention are used to protect neural cells from the damaging effects of hypoxia. In a further preferred embodiment, the polypeptides, polynucleotides, or agonists or antagonists of the invention are used to protect neural cells from the damaging effects of cerebral hypoxia. According to this embodiment, the compositions of the invention are used to treat or prevent neural cell injury associated with cerebral hypoxia. In one non-exclusive aspect of this embodiment, the polypeptides, polynucleotides, or agonists or antagonists of the invention, are used to treat or prevent neural cell injury associated with cerebral ischemia. In another non-exclusive aspect of this embodiment, the polypeptides, polynucleotides, or agonists or antagonists of the invention are used to treat or prevent neural cell injury associated with cerebral infarction.

[0676] In another preferred embodiment, the polypeptides, polynucleotides, or agonists or antagonists of the invention are used to treat or prevent neural cell injury associated with a stroke. In a specific embodiment, the polypeptides, polynucleotides, or agonists or antagonists of the invention are used to treat or prevent cerebral neural cell injury associated with a stroke.

[0677] In another preferred embodiment, the polypeptides, polynucleotides, or agonists or antagonists of the invention are used to treat or prevent neural cell injury associated with a heart attack. In a specific embodiment, the polypeptides, polynucleotides, or agonists or antagonists of the invention are used to treat or prevent cerebral neural cell injury associated with a heart attack.

[0678] The compositions of the invention which are useful for treating or preventing a nervous system disorder may be selected by testing for biological activity in promoting the survival or differentiation of neurons. For example, and not by way of limitation, compositions of the invention which elicit any of the following effects may be useful according to the invention: (1) increased survival time of neurons in culture either in the presence or absence of hypoxia or hypoxic conditions; (2) increased sprouting of neurons in culture or in vivo; (3) increased production of a neuron-associated molecule in culture or in vivo, e.g., choline acetyltransferase or acetylcholinesterase with respect to motor neurons; or (4) decreased symptoms of neuron dysfunction in vivo. Such effects may be measured by any method known in the art. In preferred, non-limiting embodiments, increased survival of neurons may routinely be measured using a method set forth herein or otherwise known in the art, such as, for example, in Zhang et al., Proc Natl Acad Sci USA 97:3637-42 (2000) or in Arakawa et al., J. Neurosci., 10:3507-15 (1990); increased sprouting of neurons may be detected by methods known in the art, such as, for example, the methods set forth in Pestronk et al, Exp. Neurol., 70:65-82 (1980), or Brown et al., Ann. Rev. Neurosci., 4:17-42 (1981); increased production of neuron-associated molecules may be measured by bioassay, enzymatic assay, antibody binding, Northern blot assay, etc., using techniques known in the art and depending on the molecule to be measured; and motor neuron dysfunction may be measured by assessing the physical manifestation of motor neuron disorder, e.g., weakness, motor neuron conduction velocity, or functional disability.

[0679] In specific embodiments, motor neuron disorders that may be treated according to the invention include, but are not limited to, disorders such as infarction, infection, exposure to toxin, trauma, surgical damage, degenerative disease or malignancy that may affect motor neurons as well as other components of the nervous system, as well as disorders that selectively affect neurons such as amyotrophic lateral sclerosis, and including, but not limited to, progressive spinal muscular atrophy, progressive bulbar palsy, primary lateral sclerosis, infantile and juvenile muscular atrophy, progressive bulbar paralysis of childhood (Fazio-Londe syndrome), poliomyelitis and the post polio syndrome, and Hereditary Motorsensory Neuropathy (Charcot-Marie-Tooth Disease).

[0680] Further, polypeptides or polynucleotides of the invention may play a role in neuronal survival; synapse formation; conductance; neural differentiation, etc. Thus, compositions of the invention (including polynucleotides, polypeptides, and agonists or antagonists) may be used to diagnose and/or treat or prevent diseases or disorders associated with these roles, including, but not limited to, learning and/or cognition disorders. The compositions of the invention may also be useful in the treatment or prevention of neurodegenerative disease states and/or behavioural disorders. Such neurodegenerative disease states and/or behavioral disorders include, but are not limited to, Alzheimer's Disease, Parkinson's Disease, Huntington's Disease, Tourette Syndrome, schizophrenia, mania, dementia, paranoia, obsessive compulsive disorder, panic disorder, learning disabilities, ALS, psychoses, autism, and altered behaviors, including disorders in feeding, sleep patterns, balance, and perception. In addition, compositions of the invention may also play a role in the treatment, prevention and/or detection of developmental disorders associated with the developing embryo, or sexually-linked disorders.

[0681] Additionally, polypeptides, polynucleotides and/or agonists or antagonists of the invention, may be useful in protecting neural cells from diseases, damage, disorders, or injury, associated with cerebrovascular disorders including, but not limited to, carotid artery diseases (e.g., carotid artery thrombosis, carotid stenosis, or Moyamoya Disease), cerebral amyloid angiopathy, cerebral aneurysm, cerebral anoxia, cerebral arteriosclerosis, cerebral arteriovenous malformations, cerebral artery diseases, cerebral embolism and thrombosis (e.g., carotid artery thrombosis, sinus thrombosis, or Wallenberg's Syndrome), cerebral hemorrhage (e.g., epidural or subdural hematoma, or subarachnoid hemorrhage), cerebral infarction, cerebral ischemia (e.g., transient cerebral ischemia, Subclavian Steal Syndrome, or v&rtebrobasilar insufficiency), vascular dementia (e.g., multi-infarct), leukomalacia, periventricular, and vascular headache (e.g., cluster headache or migraines).

[0682] In accordance with yet a further aspect of the present invention, there is provided a process for utilizing polynucleotides or polypeptides, as well as agonists or antagonists of the present invention, for therapeutic purposes, for example, to stimulate neurological cell proliferation and/or differentiation. Therefore, polynucleotides, polypeptides, agonists and/or antagonists of the invention may be used to treat and/or detect neurologic diseases. Moreover, polynucleotides or polypeptides, or agonists or antagonists of the invention, can be used as a marker or detector of a particular nervous system disease or disorder.

[0683] Examples of neurologic diseases which can be treated or detected with polynucleotides, polypeptides, agonists, and/or antagonists of the present invention include brain diseases, such as metabolic brain diseases which includes phenylketonuria such as maternal phenylketonuria, pyruvate carboxylase deficiency, pyruvate dehydrogenase complex deficiency, Wernicke's Encephalopathy, brain edema, brain neoplasms such as cerebellar neoplasms which include infratentorial neoplasms, cerebral ventricle neoplasms such as choroid plexus neoplasms, hypothalamic neoplasms, supratentorial neoplasms, canavan disease, cerebellar diseases such as cerebellar ataxia which include spinocerebellar degeneration such as ataxia telangiectasia, cerebellar dyssynergia, Friederich's Ataxia, Machado-Joseph Disease, olivopontocerebellar atrophy, cerebellar neoplasms such as infratentorial neoplasms, diffuse cerebral sclerosis such as encephalitis periaxialis, globoid cell leukodystrophy, metachromatic leukodystrophy and subacute sclerosing panencephalitis.

[0684] Additional neurologic diseases which can be treated or detected with polynucleotides, polypeptides, agonists, and/or antagonists of the present invention include cerebrovascular disorders (such as carotid artery diseases which include carotid artery thrombosis, carotid stenosis and Moyamoya Disease), cerebral amyloid angiopathy, cerebral aneurysm, cerebral anoxia, cerebral arteriosclerosis, cerebral arteriovenous malformations, cerebral artery diseases, cerebral embolism and thrombosis such as carotid artery thrombosis, sinus thrombosis and Wallenberg's Syndrome, cerebral hemorrhage such as epidural hematoma, subdural hematoma and subarachnoid hemorrhage, cerebral infarction, cerebral ischemia such as transient cerebral ischemia, Subclavian Steal Syndrome and vertebrobasilar insufficiency, vascular dementia such as multi-infarct dementia, periventricular leukomalacia, vascular headache such as cluster headache and migraine.

[0685] Additional neurologic diseases which can be treated or detected with polynucleotides, polypeptides, agonists, and/or antagonists of the present invention include dementia such as AIDS Dementia Complex, presenile dementia such as Alzheimer's Disease and Creutzfeldt-Jakob Syndrome, senile dementia such as Alzheimer's Disease and progressive supranuclear palsy, vascular dementia such as multi-infarct dementia, encephalitis which include encephalitis periaxialis, viral encephalitis such as epidemic encephalitis, Japanese Encephalitis, St. Louis Encephalitis, tick-borne encephalitis and West Nile Fever, acute disseminated encephalomyelitis, meningoencephalitis such as uveomeningoencephalitic syndrome, Postencephalitic Parkinson Disease and subacute sclerosing panencephalitis, encephalomalacia such as periventricular leukomalacia, epilepsy such as generalized epilepsy which includes infantile spasms, absence epilepsy, myoclonic epilepsy which includes MERRF Syndrome, tonic-clonic epilepsy, partial epilepsy such as complex partial epilepsy, frontal lobe epilepsy and temporal lobe epilepsy, post-traumatic epilepsy, status epilepticus such as Epilepsia Partialis Continua, and Hallervorden-Spatz Syndrome.

[0686] Additional neurologic diseases which can be treated or detected with polynucleotides, polypeptides, agonists, and/or antagonists of the present invention include hydrocephalus such as Dandy-Walker Syndrome and normal pressure hydrocephalus, hypothalamic diseases such as hypothalamic neoplasms, cerebral malaria, narcolepsy which includes cataplexy, bulbar poliomyelitis, cerebri pseudotumor, Rett Syndrome, Reye's Syndrome, thalamic diseases, cerebral toxoplasmosis, intracranial tuberculoma and Zellweger Syndrome, central nervous system infections such as AIDS Dementia Complex, Brain Abscess, subdural empyema, encephalomyelitis such as Equine Encephalomyelitis, Venezuelan Equine Encephalomyelitis, Necrotizing Hemorrhagic Encephalomyelitis, Visna, and cerebral malaria.

[0687] Additional neurologic diseases which can be treated or detected with polynucleotides, polypeptides, agonists, and/or antagonists of the present invention include meningitis such as arachnoiditis, aseptic meningtitis such as viral meningtitis which includes lymphocytic choriomeningitis, Bacterial meningtitis which includes Haemophilus Meningtitis, Listeria Meningtitis, Meningococcal Meningtitis such as Waterhouse-Friderichsen Syndrome, Pneumococcal Meningtitis and meningeal tuberculosis, fungal meningitis such as Cryptococcal Meningtitis, subdural effusion, meningoencephalitis such as uvemeningoencephalitic syndrome, myelitis such as transverse myelitis, neurosyphilis such as tabes dorsalis, poliomyelitis which includes bulbar poliomyelitis and postpoliomyelitis syndrome, prion diseases (such as Creutzfeldt-Jakob Syndrome, Bovine Spongiform Encephalopathy, Gerstmann-Straussler Syndrome, Kuru, Scrapie), and cerebral toxoplasmosis.

[0688] Additional neurologic diseases which can be treated or detected with polynucleotides, polypeptides, agonists, and/or antagonists of the present invention include central nervous system neoplasms such as brain neoplasms that include cerebellar neoplasms such as infratentorial neoplasms, cerebral ventricle neoplasms such as choroid plexus neoplasms, hypothalamic neoplasms and supratentorial neoplasms, meningeal neoplasms, spinal cord neoplasms which include epidural neoplasms, demyelinating diseases such as Canavan Diseases, diffuse cerebral sceloris which includes adrenoleukodystrophy, encephalitis periaxialis, globoid cell leukodystrophy, diffuse cerebral sclerosis such as metachromatic leukodystrophy, allergic encephalomyelitis, necrotizing hemorrhagic encephalomyelitis, progressive multifocal leukoencephalopathy, multiple sclerosis, central pontine myelinolysis, transverse myelitis, neuromyelitis optica, Scrapie, Swayback, Chronic Fatigue Syndrome, Visna, High Pressure Nervous Syndrome, Meningism, spinal cord diseases such as amyotonia congenita, amyotrophic lateral sclerosis, spinal muscular atrophy such as Werdnig-Hoffmann Disease, spinal cord compression, spinal cord neoplasms such as epidural neoplasms, syringomyelia, Tabes Dorsalis, Stiff-Man Syndrome, mental retardation such as Angelman Syndrome, Cri-du-Chat Syndrome, De Lange's Syndrome, Down Syndrome, Gangliosidoses such as gangliosidoses G(M1), Sandhoff Disease, Tay-Sachs Disease, Hartnup Disease, homocystinuria, Laurence-Moon-Biedl Syndrome, Lesch-Nyhan Syndrome, Maple Syrup Urine Disease, mucolipidosis such as fucosidosis, neuronal ceroid-lipofuscinosis, oculocerebrorenal syndrome, phenylketonuria such as maternal phenylketonuria, Prader-Willi Syndrome, Rett Syndrome, Rubinstein-Taybi Syndrome, Tuberous Sclerosis, WAGR Syndrome, nervous system abnormalities such as holoprosencephaly, neural tube defects such as anencephaly which includes hydrangencephaly, Arnold-Chairi Deformity, encephalocele, meningocele, meningomyelocele, spinal dysraphism such as spina bifida cystica and spina bifida occulta.

[0689] Additional neurologic diseases which can be treated or detected with polynucleotides, polypeptides, agonists, and/or antagonists of the present invention include hereditary motor and sensory neuropathies which include Charcot-Marie Disease, Hereditary optic atrophy, Refsum's Disease, hereditary spastic paraplegia, Werdnig-Hoffmann Disease, Hereditary Sensory and Autonomic Neuropathies such as Congenital Analgesia and Familial Dysautonomia, Neurologic manifestations (such as agnosia that include Gerstmann's Syndrome, Amnesia such as retrograde amnesia, apraxia, neurogenic bladder, cataplexy, communicative disorders such as hearing disorders that includes deafness, partial hearing loss, loudness recruitment and tinnitus, language disorders such as aphasia which include agraphia, anomia, broca aphasia, and Wernicke Aphasia, Dyslexia such as Acquired Dyslexia, language development disorders, speech disorders such as aphasia which includes anomia, broca aphasia and Wernicke Aphasia, articulation disorders, communicative disorders such as speech disorders which include dysarthria, echolalia, mutism and stuttering, voice disorders such as aphonia and hoarseness, decerebrate state, delirium, fasciculation, hallucinations, meningism, movement disorders such as angelman syndrome, ataxia, athetosis, chorea, dystonia, hypokinesia, muscle hypotonia, myoclonus, tic, torticollis and tremor, muscle hypertonia such as muscle rigidity such as stiff-man syndrome, muscle spasticity, paralysis such as facial paralysis which includes Herpes Zoster Oticus, Gastroparesis, Hemiplegia, ophthalmoplegia such as diplopia, Duane's Syndrome, Horner's Syndrome, Chronic progressive external ophthalmoplegia such as Kearns Syndrome, Bulbar Paralysis, Tropical Spastic Paraparesis, Paraplegia such as Brown-Sequard Syndrome, quadriplegia, respiratory paralysis and vocal cord paralysis, paresis, phantom limb, taste disorders such as ageusia and dysgeusia, vision disorders such as amblyopia, blindness, color vision defects, diplopia, hemianopsia, scotoma and subnormal vision, sleep disorders such as hypersomnia which includes Kleine-Levin Syndrome, insomnia, and somnambulism, spasm such as trismus, unconsciousness such as coma, persistent vegetative state and syncope and vertigo, neuromuscular diseases such as amyotonia congenita, amyotrophic lateral sclerosis, Lambert-Eaton Myasthenic Syndrome, motor neuron disease, muscular atrophy such as spinal muscular atrophy, Charcot-Marie Disease and Werdnig-Hoffmann Disease, Postpoliomyelitis Syndrome, Muscular Dystrophy, Myasthenia Gravis, Myotonia Atrophica, Myotonia Confenita, Nemaline Myopathy, Familial Periodic Paralysis, Multiplex Paramyloclonus, Tropical Spastic Paraparesis and Stiff-Man Syndrome, peripheral nervous system diseases such as acrodynia, amyloid neuropathies, autonomic nervous system diseases such as Adie's Syndrome, Barre-Lieou Syndrome, Familial Dysautonomia, Homer's Syndrome, Reflex Sympathetic Dystrophy and Shy-Drager Syndrome, Cranial Nerve Diseases such as Acoustic Nerve Diseases such as Acoustic Neuroma which includes Neurofibromatosis 2, Facial Nerve Diseases such as Facial Neuralgia,Melkersson-Rosenthal Syndrome, ocular motility disorders which includes amblyopia, nystagmus, oculomotor nerve paralysis, ophthalmoplegia such as Duane's Syndrome, Horner's Syndrome, Chronic Progressive External Ophthalmoplegia which includes Kearns Syndrome, Strabismus such as Esotropia and Exotropia, Oculomotor Nerve Paralysis, Optic Nerve Diseases such as Optic Atrophy which includes Hereditary Optic Atrophy, Optic Disk Drusen, Optic Neuritis such as Neuromyelitis Optica, Papilledema, Trigeminal Neuralgia, Vocal Cord Paralysis, Demyelinating Diseases such as Neuromyelitis Optica and Swayback, and Diabetic neuropathies such as diabetic foot.

[0690] Additional neurologic diseases which can be treated or detected. with polynucleotides, polypeptides, agonists, and/or antagonists of the present invention include nerve compression syndromes such as carpal tunnel syndrome, tarsal tunnel syndrome, thoracic outlet syndrome such as cervical rib syndrome, ulnar nerve compression syndrome, neuralgia such as causalgia, cervico-brachial neuralgia, facial neuralgia and trigeminal neuralgia, neuritis such as experimental allergic neuritis, optic neuritis, polyneuritis, polyradiculoneuritis and radiculities such as polyradiculitis, hereditary motor and sensory neuropathies such as Charcot-Marie Disease, Hereditary Optic Atrophy, Refsum's Disease, Hereditary Spastic Paraplegia and Werdnig-Hoffmann Disease, Hereditary Sensory and Autonomic Neuropathies which include Congenital Analgesia and Familial Dysautonomia, POEMS Syndrome, Sciatica, Gustatory Sweating and Tetany).

[0691] Endocrine Disorders

[0692] Polynucleotides or polypeptides, or agonists or antagonists of the present invention, may be used to treat, prevent, diagnose, and/or prognose disorders and/or diseases related to hormone imbalance, and/or disorders or diseases of the endocrine system.

[0693] Hormones secreted by the glands of the endocrine system control physical growth, sexual function, metabolism, and other functions. Disorders may be classified in two ways: disturbances in the production of hormones, and the inability of tissues to respond to hormones. The etiology of these hormone imbalance or endocrine system diseases, disorders or conditions may be genetic, somatic, such as cancer and some autoimmune diseases, acquired (e.g., by chemotherapy, injury or toxins), or infectious. Moreover, polynucleotides, polypeptides, antibodies, and/or agonists or antagonists of the present invention can be used as a marker or detector of a particular disease or disorder related to the endocrine system and/or hormone imbalance.

[0694] Endocrine system and/or hormone imbalance and/or diseases encompass disorders of uterine motility including, but not limited to: complications with pregnancy and labor (e.g., pre-term labor, post-term pregnancy, spontaneous abortion, and slow or stopped labor); and disorders and/or diseases of the menstrual cycle (e.g., dysmenorrhea and endometriosis).

[0695] Endocrine system and/or hormone imbalance disorders and/or diseases include disorders and/or diseases of the pancreas, such as, for example, diabetes mellitus, diabetes insipidus, congenital pancreatic agenesis, pheochromocytoma—islet cell tumor syndrome; disorders and/or diseases of the adrenal glands such as, for example, Addison's Disease, corticosteroid deficiency, virilizing disease, hirsutism, Cushing's Syndrome, hyperaldosteronism, pheochromocytoma; disorders and/or diseases of the pituitary gland, such as, for example, hyperpituitarism, hypopituitarism, pituitary dwarfism, pituitary adenoma, panhypopituitarism, acromegaly, gigantism; disorders and/or diseases of the thyroid, including but not limited to, hyperthyroidism, hypothyroidism, Plummer's disease, Graves' disease (toxic diffuse goiter), toxic nodular goiter, thyroiditis (Hashimoto's thyroiditis, subacute granulomatous thyroiditis, and silent lymphocytic thyroiditis), Pendred's syndrome, myxedema, cretinism, thyrotoxicosis, thyroid hormone coupling defect, thymic aplasia, Hurthle cell tumours of the thyroid, thyroid cancer, thyroid carcinoma, Medullary thyroid carcinoma; disorders and/or diseases of the parathyroid, such as, for example, hyperparathyroidism, hypoparathyroidism; disorders and/or diseases of the hypothalamus.

[0696] In addition, endocrine system and/or hormone imbalance disorders and/or diseases may also include disorders and/or diseases of the testes or ovaries, including cancer. Other disorders and/or diseases of the testes or ovaries further include, for example, ovarian cancer, polycystic ovary syndrome, Klinefelter's syndrome, vanishing testes syndrome (bilateral anorchia), congenital absence of Leydig's cells, cryptorchidism, Noonan's syndrome, myotonic dystrophy, capillary haemangioma of the testis (benign), neoplasias of the testis and neo-testis.

[0697] Moreover, endocrine system and/or hormone imbalance disorders and/or diseases may also include disorders and/or diseases such as, for example, polyglandular deficiency syndromes, pheochromocytoma, neuroblastoma, multiple Endocrine neoplasia, and disorders and/or cancers of endocrine tissues.

[0698] In another embodiment, a polypeptide of the invention, or polynucleotides, antibodies, agonists, or antagonists corresponding to that polypeptide, may be used to diagnose, prognose, prevent, and/or treat endocrine diseases and/or disorders associated with the tissue(s) in which the polypeptide of the invention is expressed, including one, two, three, four, five, or more tissues disclosed in Table 1A, column 8 (Tissue Distribution Library Code).

[0699] Reproductive System Disorders

[0700] The polynucleotides or polypeptides, or agonists or antagonists of the invention may be used for the diagnosis, treatment, or prevention of diseases and/or disorders of the reproductive system. Reproductive system disorders that can be treated by the compositions of the invention, include, but are not limited to, reproductive system injuries, infections, neoplastic disorders, congenital defects, and diseases or disorders which result in infertility, complications with pregnancy, labor, or parturition, and postpartum difficulties.

[0701] Reproductive system disorders and/or diseases include diseases and/or disorders of the testes, including testicular atrophy, testicular feminization, cryptorchism (unilateral and bilateral), anorchia, ectopic testis, epididymitis and orchitis (typically resulting from infections such as, for example, gonorrhea, mumps, tuberculosis, and syphilis), testicular torsion, vasitis nodosa, germ cell tumors (e.g., seminomas, embryonal cell carcinomas, teratocarcinomas, choriocarcinomas, yolk sac tumors, and teratomas), stromal tumors (e.g., Leydig cell tumors), hydrocele, hematocele, varicocele, spermatocele, inguinal hernia, and disorders of sperm production (e.g., immotile cilia syndrome, aspermia, asthenozoospermia, azoospermia, oligospermia, and teratozoospermia).

[0702] Reproductive system disorders also include disorders of the prostate gland, such as acute non-bacterial prostatitis, chronic non-bacterial prostatitis, acute bacterial prostatitis, chronic bacterial prostatitis, prostatodystonia, prostatosis, granulomatous prostatitis, malacoplakia, benign prostatic hypertrophy or hyperplasia, and prostate neoplastic disorders, including adenocarcinomas, transitional cell carcinomas, ductal carcinomas, and squamous cell carcinomas.

[0703] Additionally, the compositions of the invention may be useful in the diagnosis, treatment, and/or prevention of disorders or diseases of the penis and urethra, including inflammatory disorders, such as balanoposthitis, balanitis xerotica obliterans, phimosis, paraphimosis, syphilis, herpes simplex virus, gonorrhea, non-gonococcal urethritis, chlamydia, mycoplasma, trichomonas, HIV, AIDS, Reiter's syndrome, condyloma acuminatum, condyloma latum, and pearly penile papules; urethral abnormalities, such as hypospadias, epispadias, and phimosis; premalignant lesions, including Erythroplasia of Queyrat, Bowen's disease, Bowenoid paplosis, giant condyloma of Buscke-Lowenstein, and varrucous carcinoma; penile cancers, including squamous cell carcinomas, carcinoma in situ, verrucous carcinoma, and disseminated penile carcinoma; urethral neoplastic disorders, including penile urethral carcinoma, bulbomembranous urethral carcinoma, and prostatic urethral carcinoma; and erectile disorders, such as priapism, Peyronie's disease, erectile dysfunction, and impotence.

[0704] Moreover, diseases and/or disorders of the vas deferens include vasculititis and CBAVD (congenital bilateral absence of the vas deferens); additionally, the polynucleotides, polypeptides, and agonists or antagonists of the present invention may be used in the diagnosis, treatment, and/or prevention of diseases and/or disorders of the seminal vesicles, including hydatid disease, congenital chloride diarrhea, and polycystic kidney disease.

[0705] Other disorders and/or diseases of the male reproductive system include, for example, Klinefelter's syndrome, Young's syndrome, premature ejaculation, diabetes mellitus, cystic fibrosis, Kartagener's syndrome, high fever, multiple sclerosis, and gynecomastia.

[0706] Further, the polynucleotides, polypeptides, and agonists or antagonists of the present invention may be used in the diagnosis, treatment, and/or prevention of diseases and/or disorders of the vagina and vulva, including bacterial vaginosis, candida vaginitis, herpes simplex virus, chancroid, granuloma inguinale, lymphogranuloma venereum, scabies, human papillomavirus, vaginal trauma, vulvar trauma, adenosis, chlamydia vaginitis, gonorrhea, trichomonas vaginitis, condyloma acuminatum, syphilis, molluscum contagiosum, atrophic vaginitis, Paget's disease, lichen sclerosus, lichen planus, vulvodynia, toxic shock syndrome, vaginismus, vulvovaginitis, vulvar vestibulitis, and neoplastic disorders, such as squamous cell hyperplasia, clear cell carcinoma, basal cell carcinoma, melanomas, cancer of Bartholin's gland, and vulvar intraepithelial neoplasia.

[0707] Disorders and/or diseases of the uterus include dysmenorrhea, retroverted uterus, endometriosis, fibroids, adenomyosis, anovulatory bleeding, amenorrhea, Cushing's syndrome, hydatidiform moles, Asherman's syndrome, premature menopause, precocious puberty, uterine polyps, dysfunctional uterine bleeding (e.g., due to aberrant hormonal signals), and neoplastic disorders, such as adenocarcinomas, keiomyosarcomas, and sarcomas. Additionally, the polypeptides, polynucleotides, or agonists or antagonists of the invention may be useful as a marker or detector of, as well as in the diagnosis, treatment, and/or prevention of congenital uterine abnormalities, such as bicornuate uterus, septate uterus, simple unicornuate uterus, unicornuate uterus with a noncavitary rudimentary horn, unicornuate uterus with a non-communicating cavitary rudimentary horn, unicornuate uterus with a communicating cavitary horn, arcuate uterus, uterine didelfus, and T-shaped uterus.

[0708] Ovarian diseases and/or disorders include anovulation, polycystic ovary syndrome (Stein-Leventhal syndrome), ovarian cysts, ovarian hypofunction, ovarian insensitivity to gonadotropins, ovarian overproduction of androgens, right ovarian vein syndrome, amenorrhea, hirutism, and ovarian cancer (including, but not limited to, primary and secondary cancerous growth, Sertoli-Leydig tumors, endometriod carcinoma of the ovary, ovarian papillary serous adenocarcinoma, ovarian mucinous adenocarcinoma, and Ovarian Krukenberg tumors).

[0709] Cervical diseases and/or disorders include cervicitis, chronic cervicitis, mucopurulent cervicitis, cervical dysplasia, cervical polyps, Nabothian cysts, cervical erosion, cervical incompetence, and cervical neoplasms (including, for example, cervical carcinoma, squamous metaplasia, squamous cell carcinoma, adenosquamous cell neoplasia, and columnar cell neoplasia).

[0710] Additionally, diseases and/or disorders of the reproductive system include disorders and/or diseases of pregnancy, including miscarriage and stillbirth, such as early abortion, late abortion, spontaneous abortion, induced abortion, therapeutic abortion, threatened abortion, missed abortion, incomplete abortion, complete abortion, habitual abortion, missed abortion, and septic abortion; ectopic pregnancy, anemia, Rh incompatibility, vaginal bleeding during pregnancy, gestational diabetes, intrauterine growth retardation, polyhydramnios, HELLP syndrome, abruptio placentae, placenta previa, hyperemesis, preeclampsia, eclampsia, herpes gestationis, and urticaria of pregnancy. Additionally, the polynucleotides, polypeptides, and agonists or antagonists of the present invention may be used in the diagnosis, treatment, and/or prevention of diseases that can complicate pregnancy, including heart disease, heart failure, rheumatic heart disease, congenital heart disease, mitral valve prolapse, high blood pressure, anemia, kidney disease, infectious disease (e.g., rubella cytomegalovirus, toxoplasmosis, infectious hepatitis, chlamydia, HIV, AIDS, and genital herpes), diabetes mellitus, Graves' disease, thyroiditis, hypothyroidism, Hashimoto's thyroiditis, chronic active hepatitis, cirrhosis of the liver, primary biliary cirrhosis, asthma, systemic lupus eryematosis, rheumatoid arthritis, myasthenia gravis, idiopathic thrombocytopenic purpura, appendicitis, ovarian cysts, gallbladder disorders, and obstruction of the intestine.

[0711] Complications associated with labor and parturition include premature rupture of the membranes, pre-term labor, post-term pregnancy, postmaturity, labor that progresses too slowly, fetal distress (e.g., abnormal heart rate (fetal or maternal), breathing problems, and abnormal fetal position), shoulder dystocia, prolapsed umbilical cord, amniotic fluid embolism, and aberrant uterine bleeding.

[0712] Further, diseases and/or disorders of the postdelivery period, including endometritis, myometritis, parametritis, peritonitis, pelvic thrombophlebitis, pulmonary embolism, endotoxemia, pyelonephritis, saphenous thrombophlebitis, mastitis, cystitis, postpartum hemorrhage, and inverted uterus.

[0713] Other disorders and/or diseases of the female reproductive system that may be diagnosed, treated, and/or prevented by the polynucleotides, polypeptides, and agonists or antagonists of the present invention include, for example, Turner's syndrome, pseudohermaphroditism, premenstrual syndrome, pelvic inflammatory disease, pelvic congestion (vascular engorgement), frigidity, anorgasmia, dyspareunia, ruptured fallopian tube, and Mittelschmerz.

[0714] Infectious Disease

[0715] Polynucleotides or polypeptides, as well as agonists or antagonists of the present invention can be used to treat or detect infectious agents. For example, by increasing the immune response, particularly increasing the proliferation and differentiation of B and/or T cells, infectious diseases may be treated. The immune response may be increased by either enhancing an existing immune response, or by initiating a new immune response. Alternatively, polynucleotides or polypeptides, as well as agonists or antagonists of the present invention may also directly inhibit the infectious agent, without necessarily eliciting an immune response.

[0716] Viruses are one example of an infectious agent that can cause disease or symptoms that can be-treated or detected by a polynucleotide or polypeptide and/or agonist or antagonist of the present invention. Examples of viruses, include, but are not limited to Examples of viruses, include, but are not limited to the following DNA and RNA viruses and viral families: Arbovirus, Adenoviridae, Arenaviridae, Arterivirus, Bimaviridae, Bunyaviridae, Caliciviridae, Circoviridae, Coronaviridae, Dengue, EBV, HIV, Flaviviridae, Hepadnaviridae (Hepatitis), Herpesviridae (such as, Cytomegalovirus, Herpes Simplex, Herpes Zoster), Mononegavirus (e.g., Paramyxoviridae, Morbillivirus, Rhabdoviridae), Orthomyxoviridae (e.g., Influenza A, Influenza B, and parainfluenza), Papiloma virus, Papovaviridae, Parvoviridae, Picornaviridae, Poxviridae (such as Smallpox or Vaccinia), Reoviridae (e.g., Rotavirus), Retroviridae (HTLV-I, HTLV-II, Lentivirus), and Togaviridae (e.g., Rubivirus). Viruses falling within these families can cause a variety of diseases or symptoms, including, but not limited to: arthritis, bronchiollitis, respiratory syncytial virus, encephalitis, eye infections (e.g., conjunctivitis, keratitis), chronic fatigue syndrome, hepatitis (A, B, C, E, Chronic Active, Delta), Japanese B encephalitis, Junin, Chikungunya, Rift Valley fever, yellow fever, meningitis, opportunistic infections (e.g., AIDS), pneumonia, Burkitt's Lymphoma, chickenpox, hemorrhagic fever, Measles, Mumps, Parainfluenza, Rabies, the common cold, Polio, leukemia, Rubella, sexually transmitted diseases, skin diseases (e.g., Kaposi's, warts), and viremia. polynucleotides or polypeptides, or agonists or antagonists of the invention, can be used to treat or detect any of these symptoms or diseases. In specific embodiments, polynucleotides, polypeptides, or agonists or antagonists of the invention are used to treat: meningitis, Dengue, EBV, and/or hepatitis (e.g., hepatitis B). In an additional specific embodiment polynucleotides, polypeptides, or agonists or antagonists of the invention are used to treat patients nonresponsive to one or more other commercially available hepatitis vaccines. In a further specific embodiment polynucleotides, polypeptides, or agonists or antagonists of the invention are used to treat AIDS.

[0717] Similarly, bacterial and fungal agents that can cause disease or symptoms and that can be treated or detected by a polynucleotide or polypeptide and/or agonist or antagonist of the present invention include, but not limited to, the following Gram-Negative and Gram-positive bacteria, bacterial families, and fungi: Actinomyces (e.g., Norcardia), Acinetobacter, Cryptococcus neoformans, Aspergillus, Bacillaceae (e.g., Bacillus anthrasis), Bacteroides (e.g., Bacteroides fragilis), Blastomycosis, Bordetella, Borrelia (e.g., Borrelia burgdorferi), Brucella, Candidia, Campylobacter, Chlamydia, Clostridium (e.g., Clostridium botulinum, Clostridium dificile, Clostridium perfringens, Clostridium tetani), Coccidioides, Corynebacterium (e.g., Corynebacterium diptheriae), Cryptococcus, Dermatocycoses, E. coli (e.g., Enterotoxigenic E. coli and Enterohemorrhagic E. coli), Enterobacter (e.g. Enterobacter aerogenes), Enterobacteriaceae (Klebsiella, Salmonella (e.g., Salmonella typhi, Salmonella enteritidis, Salmonella typhi), Serratia, Yersinia, Shigella), Erysipelothrix, Haemophilus (e.g., Haemophilis influenza type B), Helicobacter, Legionella (e.g., Legionella pneumophila), Leptospira, Listeria (e.g., Listeria monocytogenes), Mycoplasma, Mycobacterium (e.g., Mycobacterium leprae and Mycobacterium tuberculosis), Vibrio (e.g., Vibrio cholerae), Neisseriaceae (e.g., Neisseria gonorrhea, Neisseria meningitidis), Pasteurellacea, Proteus, Pseudomonas (e.g., Pseudomonas aeruginosa), Rickettsiaceae, Spirochetes (e.g., Treponema spp., Leptospira spp., Borrelia spp.), Shigella spp., Staphylococcus (e.g., Staphylococcus aureus), Meningiococcus, Pneumococcus and Streptococcus (e.g., Streptococcus pneumoniae and Groups A, B, and C Streptococci), and Ureaplasmas. These bacterial, parasitic, and fungal families can cause diseases or symptoms, including, but not limited to: antibiotic-resistant infections, bacteremia, endocarditis, septicemia, eye infections (e.g., conjunctivitis), uveitis, tuberculosis, gingivitis, bacterial diarrhea, opportunistic infections (e.g., AIDS related infections), paronychia, prosthesis-related infections, dental caries, Reiter's Disease, respiratory tract infections, such as Whooping Cough or Empyema, sepsis, Lyme Disease, Cat-Scratch Disease, dysentery, paratyphoid fever, food poisoning, Legionella disease, chronic and acute inflammation, erythema, yeast infections, typhoid, pneumonia, gonorrhea, meningitis (e.g., mengitis types A and B), chlamydia, syphillis, diphtheria, leprosy, brucellosis, peptic ulcers, anthrax, spontaneous abortions, birth defects, pneumonia, lung infections, ear infections, deafness, blindness, lethargy, malaise, vomiting, chronic diarrhea, Crohn's disease, colitis, vaginosis, sterility, pelvic inflammatory diseases, candidiasis, paratuberculosis, tuberculosis, lupus, botulism, gangrene, tetanus, impetigo, Rheumatic Fever, Scarlet Fever, sexually transmitted diseases, skin diseases (e.g., cellulitis, dermatocycoses), toxemia, urinary tract infections, wound infections, noscomial infections. Polynucleotides or polypeptides, agonists or antagonists of the invention, can be used to treat or detect any of these symptoms or diseases. In specific embodiments, polynucleotides, polypeptides, agonists or antagonists of the invention are used to treat: tetanus, diptheria, botulism, and/or meningitis type B.

[0718] Moreover, parasitic agents causing disease or symptoms that can be treated, prevented, and/or diagnosed by a polynucleotide or polypeptide and/or agonist or antagonist of the present invention include, but not limited to, the following families or class: Amebiasis, Babesiosis, Coccidiosis, Cryptosporidiosis, Dientamoebiasis, Dourine, Ectoparasitic, Giardias, Helminthiasis, Leishmaniasis, Schistisoma, Theileriasis, Toxoplasmosis, Trypanosomiasis, and Trichomonas and Sporozoans (e.g., Plasmodium virax, Plasmodium falciparium, Plasmodium malariae and Plasmodium ovale). These parasites can cause a variety of diseases or symptoms, including, but not limited to: Scabies, Trombiculiasis, eye infections, intestinal disease (e.g., dysentery, giardiasis), liver disease, lung disease, opportunistic infections (e.g., AIDS related), malaria, pregnancy complications, and toxoplasmosis. polynucleotides or polypeptides, or agonists or antagonists of the invention, can be used to treat, prevent, and/or diagnose any of these symptoms or diseases. In specific embodiments, polynucleotides, polypeptides, or agonists or antagonists of the invention are used to treat, prevent, and/or diagnose malaria.

[0719] Polynucleotides or polypeptides, as well as agonists or antagonists of the present invention of the present invention could either be by administering an effective amount of a polypeptide to the patient, or by removing cells from the patient, supplying the cells with a polynucleotide of the present invention, and returning the engineered cells to the patient (ex vivo therapy). Moreover, the polypeptide or polynucleotide of the present invention can be used as an antigen in a vaccine to raise an immune response against infectious disease.

[0720] Regeneration

[0721] Polynucleotides or polypeptides, as well as agonists or antagonists of the present invention can be used to differentiate, proliferate, and attract cells, leading to the regeneration of tissues. (See, Science 276:59-87 (1997)). The regeneration of tissues could be used to repair, replace, or protect tissue damaged by congenital defects, trauma (wounds, burns, incisions, or ulcers), age, disease (e.g. osteoporosis, osteocarthritis, periodontal disease, liver failure), surgery, including cosmetic plastic surgery, fibrosis, teperfusion injury, or systemic cytokine damage.

[0722] Tissues that could be regenerated using the present invention include organs (e.g., pancreas, liver, intestine, kidney, skin, endothelium), muscle (smooth, skeletal or cardiac), vasculature (including vascular and lymphatics), nervous, hematopoietic, and skeletal (bone, cartilage, tendon, and ligament) tissue. Preferably, regeneration occurs without or decreased scarring. Regeneration also may include angiogenesis.

[0723] Moreover, polynucleotides or polypeptides, as well as agonists or antagonists of the present invention, may increase regeneration of tissues difficult to heal. For example, increased tendon/ligament regeneration would quicken recovery time after damage. Polynucleotides or polypeptides, as well as agonists or antagonists of the present invention could also be used prophylactically in an effort to avoid damage. Specific diseases that could be treated include of tendinitis, carpal tunnel syndrome, and other tendon or ligament defects. A further example of tissue regeneration of non-healing wounds includes pressure ulcers, ulcers associated with vascular insufficiency, surgical, and traumatic wounds.

[0724] Similarly, nerve and brain tissue could also be regenerated by using polynucleotides or polypeptides, as well as agonists or antagonists of the present invention, to proliferate and differentiate nerve cells. Diseases that could be treated using this method include central and peripheral nervous system diseases, neuropathies, or mechanical and traumatic disorders (e.g., spinal cord disorders, head trauma, cerebrovascular disease, and stoke). Specifically, diseases associated with peripheral nerve injuries, peripheral neuropathy (e.g., resulting from chemotherapy or other medical therapies), localized neuropathies, and central nervous system diseases (e.g., Alzheimer's disease, Parkinson's disease, Huntington's disease, amyotrophic lateral sclerosis, and Shy-Drager syndrome), could all be treated using the polynucleotides or polypeptides, as well as agonists or antagonists of the present invention.

[0725] Gastrointestinal Disorders

[0726] Polynucleotides or polypeptides, or agonists or antagonists of the present invention, may be used to treat, prevent, diagnose, and/or prognose gastrointestinal disorders, including inflammatory diseases and/or conditions, infections, cancers (e.g., intestinal neoplasms (carcinoid tumor of the small intestine, non-Hodgkin's lymphoma of the small intestine, small bowl lymphoma)), and ulcers, such as peptic ulcers.

[0727] Gastrointestinal disorders include dysphagia, odynophagia, inflammation of the esophagus, peptic esophagitis, gastric reflux, submucosal fibrosis and stricturing, Mallory-Weiss lesions, leiomyomas, lipomas, epidermal cancers, adeoncarcinomas, gastric retention disorders, gastroenteritis, gastric atrophy, gastric/stomach cancers, polyps of the stomach, autoimmune disorders such as pernicious anemia, pyloric stenosis, gastritis (bacterial, viral, eosinophilic, stress-induced, chronic erosive, atrophic, plasma cell, and Menetrier's), and peritoneal diseases (e.g., chyloperioneum, hemoperitoneum, mesenteric cyst, mesenteric lymphadenitis, mesenteric vascular occlusion, panniculitis, neoplasms, peritonitis, pneumoperitoneum, bubphrenic abscess,).

[0728] Gastrointestinal disorders also include disorders associated with the small intestine, such as malabsorption syndromes, distension, irritable bowel syndrome, sugar intolerance, celiac disease, duodenal ulcers, duodenitis, tropical sprue, Whipple's disease, intestinal lymphangiectasia, Crohn's disease, appendicitis, obstructions of the ileum, Meckel's diverticulum, multiple diverticula, failure of complete rotation of the small and large intestine, lymphoma, and bacterial and parasitic diseases (such as Traveler's diarrhea, typhoid and paratyphoid, cholera, infection by Roundworms (Ascariasis lumbricoides), Hookworms (Ancylostoma duodenale), Threadworms (Enterobils vermicularis), Tapeworms (Taenia saginata, Echinococcus granulosus, Diphyllobothrium spp., and T. solium).

[0729] Liver diseases and/or disorders include intrahepatic cholestasis (alagille syndrome, biliary liver cirrhosis), fatty liver (alcoholic fatty liver, reye syndrome), hepatic vein thrombosis, hepatolentricular degeneration, hepatomegaly, hepatopulmonary syndrome, hepatorenal syndrome, portal hypertension (esophageal and gastric varices), liver abscess (amebic liver abscess), liver cirrhosis (alcoholic, biliary and experimental), alcoholic liver diseases (fatty liver, hepatitis, cirrhosis), parasitic (hepatic echinococcosis, fascioliasis, amebic liver abscess), jaundice (hemolytic, hepatocellular, and cholestatic), cholestasis, portal hypertension, liver enlargement, ascites, hepatitis (alcoholic hepatitis, animal hepatitis, chronic hepatitis (autoimmune, hepatitis B, hepatitis C, hepatitis D, drug induced), toxic hepatitis, viral human hepatitis (hepatitis A, hepatitis B, hepatitis C, hepatitis D, hepatitis E), Wilson's disease, granulomatous hepatitis, secondary biliary cirrhosis, hepatic encephalopathy, portal hypertension, varices, hepatic encephalopathy, primary biliary cirrhosis, primary sclerosing cholangitis, hepatocellular adenoma, hemangiomas, bile stones, liver failure (hepatic encephalopathy, acute liver failure), and liver neoplasms (angiomyolipoma, calcified liver metastases, cystic liver metastases, epithelial tumors, fibrolamellar hepatocarcinoma, focal nodular hyperplasia, hepatic adenoma, hepatobiliary cystadenoma, hepatoblastoma, hepatocellular carcinoma, hepatoma, liver cancer, liver hemangioendothelioma, mesenchymal hamartoma, mesenchymal tumors of liver, nodular regenerative hyperplasia, benign liver tumors (Hepatic cysts [Simple cysts, Polycystic liver disease, Hepatobiliary cystadenoma, Choledochal cyst], Mesenchymal tumors [Mesenchymal hamartoma, Infantile hemangioendothelioma, Hemangioma, Peliosis hepatis, Lipomas, Inflammatory pseudotumor, Miscellaneous], Epithelial tumors [Bile duct epithelium (Bile duct hamartoma, Bile duct adenoma), Hepatocyte (Adenoma, Focal nodular hyperplasia, Nodular regenerative hyperplasia)], malignant liver tumors [hepatocellular, hepatoblastoma, hepatocellular carcinoma, cholangiocellular, cholangiocarcinoma, cystadenocarcinoma, tumors of blood vessels, angiosarcoma, Karposi's sarcoma, hemangioendothelioma, other tumors, embryonal sarcoma, fibrosarcoma, leiomyosarcoma, rhabdomyosarcoma, carcinosarcoma, teratoma, carcinoid, squamous carcinoma, primary lymphoma]), peliosis hepatis, erythrohepatic porphyria, hepatic porphyria (acute intermittent porphyria, porphyria cutanea tarda), Zellweger syndrome).

[0730] Pancreatic diseases and/or disorders include acute pancreatitis, chronic pancreatitis (acute necrotizing pancreatitis, alcoholic pancreatitis), neoplasms (adenocarcinoma of the pancreas, cystadenocarcinoma, insulinoma, gastrinoma, and glucagonoma, cystic neoplasms, islet-cell tumors, pancreoblastoma), and other pancreatic diseases (e.g., cystic fibrosis, cyst (pancreatic pseudocyst, pancreatic fistula, insufficiency)).

[0731] Gallbladder diseases include gallstones (cholelithiasis and choledocholithiasis), postcholecystectomy syndrome, diverticulosis of the gallbladder, acute cholecystitis, chronic cholecystitis, bile duct tumors, and mucocele.

[0732] Diseases and/or disorders of the large intestine include antibiotic-associated colitis, diverticulitis, ulcerative colitis, acquired megacolon, abscesses, fungal and bacterial infections, anorectal disorders (e.g., fissures, hemorrhoids), colonic diseases (colitis, colonic neoplasms [colon cancer, adenomatous colon polyps (e.g., villous adenoma), colon carcinoma, colorectal cancer], colonic diverticulitis, colonic diverticulosis, megacolon [Hirschsprung disease, toxic megacolon]; sigmoid diseases [proctocolitis, sigmoin neoplasms]), constipation, Crohn's disease, diarrhea (infantile diarrhea, dysentery), duodenal diseases (duodenal neoplasms, duodenal obstruction, duodenal ulcer, duodenitis), enteritis (enterocolitis), HIV enteropathy, ileal diseases (ileal neoplasms, ileitis), immunoproliferative small intestinal disease, inflammatory bowel disease (ulcerative colitis, Crohn's disease), intestinal atresia, parasitic diseases (anisakiasis, balantidiasis, bastocystis infections, cryptosporidiosis, dientamoebiasis, amebic dysentery, giardiasis), intestinal fistula (rectal fistula), intestinal neoplasms (cecal neoplasms, colonic neoplasms, duodenal neoplasms, ileal neoplasms, intestinal polyps, jejunal neoplasms, rectal neoplasms), intestinal obstruction (afferent loop syndrome, duodenal obstruction, impacted feces, intestinal pseudo-obstruction [cecal volvulus], intussusception), intestinal perforation, intestinal polyps (colonic polyps, gardner syndrome, peutz-jeghers syndrome), jejunal diseases (jejunal neoplasms), malabsorption syndromes (blind loop syndrome, celiac disease, lactose intolerance, short bowl syndrome, tropical sprue, whipple's disease), mesenteric vascular occlusion, pneumatosis cystoides intestinalis, protein-losing enteropathies (intestinal lymphagiectasis), rectal diseases (anus diseases, fecal incontinence, hemorrhoids, proctitis, rectal fistula, rectal prolapse, rectocele), peptic ulcer (duodenal ulcer, peptic esophagitis, hemorrhage, perforation, stomach ulcer, Zollinger-Ellison syndrome), postgastrectomy syndromes (dumping syndrome), stomach diseases (e.g. achlorhydria, duodenogastric reflux (bile reflux), gastric antral vascular ectasia, gastric fistula, gastric outlet obstruction, gastritis (atrophic or hypertrophic), gastroparesis, stomach dilatation, stomach diverticulum, stomach neoplasms (gastric cancer, gastric polyps, gastric adenocarcinoma, hyperplastic gastric polyp), stomach rupture, stomach ulcer, stomach volvulus), tuberculosis, visceroptosis, vomiting (e.g., hematemesis, hyperemesis gravidarum, postoperative nausea and vomiting) and hemorrhagic colitis.

[0733] Further diseases and/or disorders of the gastrointestinal system include biliary tract diseases, such as, gastroschisis, fistula (e.g., biliary fistula, esophageal fistula, gastric fistula, intestinal fistula, pancreatic fistula), neoplasms (e.g., biliary tract neoplasms, esophageal neoplasms, such as adenocarcinoma of the esophagus, esophageal squamous cell carcinoma, gastrointestinal neoplasms, pancreatic neoplasms, such as adenocarcinoma of the pancreas, mucinous cystic neoplasm of the pancreas, pancreatic cystic neoplasms, pancreatoblastoma, and peritoneal neoplasms), esophageal disease (e.g., bullous diseases, candidiasis, glycogenic acanthosis, ulceration, barrett esophagus varices, atresia, cyst, diverticulum (e.g., Zenker's diverticulum), fistula (e.g., tracheoesophageal fistula), motility disorders (e.g., CREST syndrome, deglutition disorders, achalasia, spasm, gastroesophageal reflux), neoplasms, perforation (e.g., Boerhaave syndrome, Mallory-Weiss syndrome), stenosis, esophagitis, diaphragmatic hernia (e.g., hiatal hernia); gastrointestinal diseases, such as, gastroenteritis (e.g., cholera morbus, norwalk virus infection), hemorrhage (e.g., hematemesis, melena, peptic ulcer hemorrhage), stomach neoplasms (gastric cancer, gastric polyps, gastric adenocarcinoma, stomach cancer)), hernia (e.g., congenital diaphragmatic hernia, femoral hernia, inguinal hernia, obturator hernia, umbilical hernia, ventral hernia), and intestinal diseases (e.g., cecal diseases (appendicitis, cecal neoplasms)).

[0734] Chemotaxis

[0735] Polynucleotides or polypeptides, as well as agonists or antagonists of the present invention may have chemotaxis activity. A chemotaxic molecule attracts or mobilizes cells (e.g., monocytes, fibroblasts, neutrophils, T-cells, mast cells, eosinophils, epithelial and/or endothelial cells) to a particular site in the body, such as inflammation, infection, or site of hyperproliferation. The mobilized cells can then fight off and/or heal the particular trauma or abnormality.

[0736] Polynucleotides or polypeptides, as well as agonists or antagonists of the present invention may increase chemotaxic activity of particular cells. These chemotactic molecules can then be used to treat inflammation, infection, hyperproliferative disorders, or any immune system disorder by increasing the number of cells 'targeted to a particular location in the body. For example, chemotaxic molecules can be used to treat wounds and other trauma to tissues by attracting immune cells to the injured location. Chemotactic molecules of the present invention can also attract fibroblasts, which can be used to treat wounds.

[0737] It is also contemplated that polynucleotides or polypeptides, as well as agonists or antagonists of the present invention may inhibit chemotactic activity. These molecules could also be used to treat disorders. Thus, polynucleotides or polypeptides, as well as agonists or antagonists of the present invention could be used as an inhibitor of chemotaxis.

[0738] Binding Activity

[0739] A polypeptide of the present invention may be used to screen for molecules that bind to the polypeptide or for molecules to which the polypeptide binds. The binding of the polypeptide and the molecule may activate (agonist), increase, inhibit (antagonist), or decrease activity of the polypeptide or the molecule bound. Examples of such molecules include antibodies, oligonucleotides, proteins (e.g., receptors), or small molecules.

[0740] Preferably, the molecule is closely related to the natural ligand of the polypeptide, e.g., a fragment of the ligand, or a natural substrate, a ligand, a structural or functional mimetic. (See, Coligan et al., Current Protocols in Immunology 1(2):Chapter 5 (1991)). Similarly, the molecule can be closely related to the natural receptor to which the polypeptide binds, or at least, a fragment of the receptor capable of being bound by the polypeptide (e.g., active site). In either case, the molecule can be rationally designed using known techniques.

[0741] Preferably, the screening for these molecules involves producing appropriate cells which express the polypeptide. Preferred cells include cells from mammals, yeast, Drosophila, or E. coli. Cells expressing the polypeptide (or cell membrane containing the expressed polypeptide) are then preferably contacted with a test compound potentially containing the molecule to observe binding, stimulation, or inhibition of activity of either the polypeptide or the molecule.

[0742] The assay may simply test binding of a candidate compound to the polypeptide, wherein binding is detected by a label, or in an assay involving competition with a labeled competitor. Further, the assay may test whether the candidate compound results in a signal generated by binding to the polypeptide.

[0743] Alternatively, the assay can be carried out using cell-free preparations, polypeptide/molecule affixed to a solid support, chemical libraries, or natural product mixtures. The assay may also simply comprise the steps of mixing a candidate compound with a solution containing a polypeptide, measuring polypeptide/molecule activity or binding, and comparing the polypeptide/molecule activity or binding to a standard.

[0744] Preferably, an ELISA assay can measure polypeptide level or activity in a sample (e.g., biological sample) using a monoclonal or polyclonal antibody. The antibody can measure polypeptide level or activity by either binding, directly or indirectly, to the polypeptide or by competing with the polypeptide for a substrate.

[0745] Additionally, the receptor to which the polypeptide of the present invention binds can be identified by numerous methods known to those of skill in the art, for example, ligand panning and FACS sorting (Coligan, et al., Current Protocols in Immun., 1(2), Chapter 5, (1991)). For example, expression cloning is employed wherein polyadenylated RNA is prepared from a cell responsive to the polypeptides, for example, NIH3T3 cells which are known to contain multiple receptors for the FGF family proteins, and SC-3 cells, and a cDNA library created from this RNA is divided into pools and used to transfect COS cells or other cells that are not responsive to the polypeptides. Transfected cells which are grown on glass slides are exposed to the polypeptide of the present invention, after they have been labeled. The polypeptides can be labeled by a variety of means including iodination or inclusion of a recognition site for a site-specific protein kinase.

[0746] Following fixation and incubation, the slides are subjected to auto-radiographic analysis. Positive pools are identified and sub-pools are prepared and re-transfected using an iterative sub-pooling and re-screening process, eventually yielding a single clones that encodes the putative receptor.

[0747] As an alternative approach for receptor identification, the labeled polypeptides can be photoaffinity linked with cell membrane or extract preparations that express the receptor molecule. Cross-linked material is resolved by PAGE analysis and exposed to X-ray film. The labeled complex containing the receptors of the polypeptides can be excised, resolved into peptide fragments, and subjected to protein microsequencing. The amino acid sequence obtained from microsequencing would be used to design a set of degenerate oligonucleotide probes to screen a cDNA library to identify the genes encoding the putative receptors.

[0748] Moreover, the techniques of gene-shuffling, motif-shuffling, exon-shuffling, and/or codon-shuffling (collectively referred to as “DNA shuffling”) may be employed to modulate the activities of the polypeptide of the present invention thereby effectively generating agonists and antagonists of the polypeptide of the present invention. See generally, U.S. Pat. Nos. 5,605,793, 5,811,238, 5,830,721, 5,834,252, and 5,837,458, and Patten, P. A., et al., Curr. Opinion Biotechnol. 8:724-33 (1997); Harayama, S. Trends Biotechnol. 16(2):76-82 (1998); Hansson, L. O., et al., J. Mol. Biol. 287:265-76 (1999); and Lorenzo, M. M. and Blasco, R. Biotechniques 24(2):308-13 (1998); each of these patents and publications are hereby incorporated by reference). In one embodiment, alteration of polynucleotides and corresponding polypeptides may be achieved by DNA shuffling. DNA shuffling involves the assembly of two or more DNA segments into a desired molecule by homologous, or site-specific, recombination. In another embodiment, polynucleotides and corresponding polypeptides may be altered by being subjected to random mutagenesis by error-prone PCR, random nucleotide insertion or other methods prior to recombination. In another embodiment, one or more components, motifs, sections, parts, domains, fragments, etc., of the polypeptide of the present invention may be recombined with one or more components, motifs, sections, parts, domains, fragments, etc. of one or more heterologous molecules. In preferred embodiments, the heterologous molecules are family members. In further preferred embodiments, the heterologous molecule is a growth factor such as, for example, platelet-derived growth factor (PDGF), insulin-like growth factor (IGF-I), transforming growth factor (TGF)-alpha, epidermal growth factor (EGF), fibroblast growth factor (FGF), TGF-beta, bone morphogenetic protein (BMP)-2, BMP-4, BMP-5, BMP-6, BMP-7, activins A and B, decapentaplegic(dpp), 60A, OP-2, dorsalin, growth differentiation factors (GDFs), nodal, MIS, inhibin-alpha, TGF-beta1, TGF-beta2, TGF-beta3, TGF-beta5, and glial-derived neurotrophic factor (GDNF).

[0749] Other preferred fragments are biologically active fragments of the polypeptide of the present invention. Biologically active fragments are those exhibiting activity similar, but not necessarily identical, to an activity of the polypeptide of the present invention. The biological activity of the fragments may include an improved desired activity, or a decreased undesirable activity.

[0750] Additionally, this invention provides a method of screening compounds to identify those which modulate the action of the polypeptide of the present invention. An example of such an assay comprises combining a mammalian fibroblast cell, a the polypeptide of the present invention, the compound to be screened and ³[H] thymidine under cell culture conditions where the fibroblast cell would normally proliferate. A control assay may be performed in the absence of the compound to be screened and compared to the amount of fibroblast proliferation in the presence of the compound to determine if the compound stimulates proliferation by determining the uptake of ³[H] thymidine in each case. The amount of fibroblast cell proliferation is measured by liquid scintillation chromatography which measures the incorporation of ³[H] thymidine. Both agonist and antagonist compounds may be identified by this procedure.

[0751] In another method, a mammalian cell or membrane preparation expressing a receptor for a polypeptide of the present invention is incubated with a labeled polypeptide of the present invention in the presence of the compound. The ability of the compound to enhance or block this interaction could then be measured. Alternatively, the response of a known second messenger system following interaction of a compound to be screened and the receptor is measured and the ability of the compound to bind to the receptor and elicit a second messenger response is measured to determine if the compound is a potential agonist or antagonist. Such second messenger systems include but are not limited to, cAMP guanylate cyclase, ion channels or phosphoinositide hydrolysis.

[0752] All of these above assays can be used as diagnostic or prognostic markers. The molecules discovered using these assays can be used to treat disease or to bring about a particular result in a patient (e.g., blood vessel growth) by activating or inhibiting the polypeptide/molecule. Moreover, the assays can discover agents which may inhibit or enhance the production of the polypeptides of the invention from suitably manipulated cells or tissues.

[0753] Therefore, the invention includes a method of identifying compounds which bind to a polypeptide of the invention comprising the steps of: (a) incubating a candidate binding compound with a polypeptide of the present invention; and (b) determining if binding has occurred. Moreover, the invention includes a method of identifying agonists/antagonists comprising the steps of: (a) incubating a candidate compound with a polypeptide of the present invention, (b) assaying a biological activity, and (b) determining if a biological activity of the polypeptide has been altered.

[0754] Targeted Delivery

[0755] In another embodiment, the invention provides a method of delivering compositions to targeted cells expressing a receptor for a polypeptide of the invention, or cells expressing a cell bound form of a polypeptide of the invention.

[0756] As discussed herein, polypeptides or antibodies of the invention may be associated with heterologous polypeptides, heterologous nucleic acids, toxins, or prodrugs via hydrophobic, hydrophilic, ionic and/or covalent interactions. In one embodiment, the invention provides a method for the specific delivery of compositions of the invention to cells by administering polypeptides of the invention (including antibodies) that are associated with heterologous polypeptides or nucleic acids. In one example, the invention provides a method for delivering a therapeutic protein into the targeted cell. In another example, the invention provides a method for delivering a single stranded nucleic acid (e.g., antisense or ribozymes) or double stranded nucleic acid (e.g., DNA that can integrate into the cell's genome or replicate episomally and that can be transcribed) into the targeted cell.

[0757] In another embodiment, the invention provides a method for the specific destruction of cells (e.g., the destruction of tumor cells) by administering polypeptides of the invention (e.g., polypeptides of the invention or antibodies of the invention) in association with toxins or cytotoxic prodrugs.

[0758] By “toxin” is meant compounds that bind and activate endogenous cytotoxic effector systems, radioisotopes, holotoxins, modified toxins, catalytic subunits of toxins, or any molecules or enzymes not normally present in or on the surface of a cell that under defined conditions cause the cell's death. Toxins that may be used according to the methods of the invention include, but are not limited to, radioisotopes known in the art, compounds such as, for example, antibodies (or complement fixing containing portions thereof) that bind an inherent or induced endogenous cytotoxic effector system, thymidine kinase, endonuclease, RNAse, alpha toxin, ricin, abrin, Pseudomonas exotoxin A, diphtheria toxin, saporin, momordin, gelonin, pokeweed antiviral protein, alpha-sarcin and cholera toxin. By “cytotoxic prodrug” is meant a non-toxic compound that is converted by an enzyme, normally present in the cell, into a cytotoxic compound. Cytotoxic prodrugs that may be used according to the methods of the invention include, but are not limited to, glutamyl derivatives of benzoic acid mustard alkylating agent, phosphate derivatives of etoposide or mitomycin C, cytosine arabinoside, daunorubisin, and phenoxyacetamide derivatives of doxorubicin.

[0759] Drug Screening

[0760] Further contemplated is the use of the polypeptides of the present invention, or the polynucleotides encoding these polypeptides, to screen for molecules which modify the activities of the polypeptides of the present invention. Such a method would include contacting the polypeptide of the present invention with a selected compound(s) suspected of having antagonist or agonist activity, and assaying the activity of these polypeptides following binding.

[0761] This invention is particularly useful for screening therapeutic compounds by using the polypeptides of the present invention, or binding fragments thereof, in any of a variety of drug screening techniques. The polypeptide or fragment employed in such a test may be affixed to a solid support, expressed on a cell surface, free in solution, or located intracellularly. One method of drug screening utilizes eukaryotic or prokaryotic host cells which are stably transformed with recombinant nucleic acids expressing the polypeptide or fragment. Drugs are screened against such transformed cells in competitive binding assays. One may measure, for example, the formulation of complexes between the agent being tested and a polypeptide of the present invention.

[0762] Thus, the present invention provides methods of screening for drugs or any other agents which affect activities mediated by the polypeptides of the present invention. These methods comprise contacting such an agent with a polypeptide of the present invention or a fragment thereof and assaying for the presence of a complex between the agent and the polypeptide or a fragment thereof, by methods well known in the art. In such a competitive binding assay, the agents to screen are typically labeled. Following incubation, free agent is separated from that present in bound form, and the amount of free or uncomplexed label is a measure of the ability of a particular agent to bind to the polypeptides of the present invention.

[0763] Another technique for drug screening provides high throughput screening for compounds having suitable binding affinity to the polypeptides of the present invention, and is described in great detail in European Patent Application 84/03564, published on Sep. 13, 1984, which is incorporated herein by reference herein. Briefly stated, large numbers of different small peptide test compounds are synthesized on a solid substrate, such as plastic pins or some other surface. The peptide test compounds are reacted with polypeptides of the present invention and washed. Bound polypeptides are then detected by methods well known in the art. Purified polypeptides are coated directly onto plates for use in the aforementioned drug screening techniques. In addition, non-neutralizing antibodies may be used to capture the peptide and immobilize it on the solid support.

[0764] This invention also contemplates the use of competitive drug screening assays in which neutralizing antibodies capable of binding polypeptides of the present invention specifically compete with a test compound for binding to the polypeptides or fragments thereof. In this manner, the antibodies are used to detect the presence of any peptide which shares one or more antigenic epitopes with a polypeptide of the invention.

[0765] Antisense And Ribozyme (Antagonists)

[0766] In specific embodiments, antagonists according to the present invention are nucleic acids corresponding to the sequences contained in SEQ ID NO:X, or the complementary strand thereof, and/or to cDNA sequences contained in cDNA Clone ID NO:Z identified for example, in Table 1A. In one embodiment, antisense sequence is generated internally, by the organism, in another embodiment, the antisense sequence is separately administered (see, for example, O'Connor, J., Neurochem. 56:560 (1991). Oligodeoxynucleotides as Antisense Inhibitors of Gene Expression, CRC Press, Boca Raton, Fla. (1988). Antisense technology can be used to control gene expression through antisense DNA or RNA, or through triple-helix formation. Antisense techniques are discussed for example, in Okano, J., Neurochem. 56:560 (1991); Oligodeoxynucleotides as Antisense Inhibitors of Gene Expression, CRC Press, Boca Raton, Fla. (1988). Triple helix formation is discussed in, for instance, Lee et al., Nucleic Acids Research 6:3073 (1979); Cooney et al., Science 241:456 (1988); and Dervan et al., Science 251:1300 (1991). The methods are based on binding of a polynucleotide to a complementary DNA or RNA.

[0767] For example, the use of c-myc and c-myb antisense RNA constructs to inhibit the growth of the non-lymphocytic leukemia cell line HL-60 and other cell lines was previously described. (Wickstrom et al. (1988); Anfossi et al. (1989)). These experiments were performed in vitro by incubating cells with the oligoribonucleotide. A similar procedure for in vivo use is described in WO 91/15580. Briefly, a pair of oligonucleotides for a given antisense RNA is produced as follows: A sequence complimentary to the first 15 bases of the open reading frame is flanked by an EcoRI site on the 5 end and a HindIII site on the 3 end. Next, the pair of oligonucleotides is heated at 90° C. for one minute and then annealed in 2× ligation buffer (20 mM TRIS HCl pH 7.5, 10 mM MgCl2, 10MM dithiothreitol (DTT) and 0.2 mM ATP) and then ligated to the EcoRI/Hind III site of the retroviral vector PMV7 (WO 91/15580).

[0768] For example, the 5′ coding portion of a polynucleotide that encodes the polypeptide of the present invention may be used to design an antisense RNA oligonucleotide of from about 10 to 40 base pairs in length. A DNA oligonucleotide is designed to be complementary to a region of the gene involved in transcription thereby preventing transcription and the production of the receptor. The antisense RNA oligonucleotide hybridizes to the mRNA in vivo and blocks translation of the mRNA molecule into receptor polypeptide.

[0769] In one embodiment, the antisense nucleic acid of the invention is produced intracellularly by transcription from an exogenous sequence. For example, a vector or a portion thereof, is transcribed, producing an antisense nucleic acid (RNA) of the invention. Such a vector would contain a sequence encoding the antisense nucleic acid. Such a vector can remain episomal or become chromosomally integrated, as long as it can be transcribed to produce the desired antisense RNA. Such vectors can be constructed by recombinant DNA technology methods standard in the art. Vectors can be plasmid, viral, or others known in the art, used for replication and expression in vertebrate cells. Expression of the sequence encoding the polypeptide of the present invention or fragments thereof, can be by any promoter known in the art to act in vertebrate, preferably human cells. Such promoters can be inducible or constitutive. Such promoters include, but are not limited to, the SV40 early promoter region (Bemoist and Chambon, Nature 29:304-310 (1981), the promoter contained in the 3′ long terminal repeat of Rous sarcoma virus (Yamamoto et al., Cell 22:787-797 (1980), the herpes thymidine promoter (Wagner et al., Proc. Natl. Acad. Sci. U.S.A. 78:1441-1445 (1981), the regulatory sequences of the metallothionein gene (Brinster, et al., Nature 296:39-42 (1982)), etc.

[0770] The antisense nucleic acids of the invention comprise a sequence complementary to at least a portion of an RNA transcript of a gene of the present invention. However, absolute complementarity, although preferred, is not required. A sequence “complementary to at least a portion of an RNA,” referred to herein, means a sequence having sufficient complementarity to be able to hybridize with the RNA, forming a stable duplex; in the case of double stranded antisense nucleic acids, a single strand of the duplex DNA may thus be tested, or triplex formation may be assayed. The ability to hybridize will depend on both the degree of complementarity and the length of the antisense nucleic acid. Generally, the larger the hybridizing nucleic acid, the more base mismatches with a RNA it may contain and still form a stable duplex (or triplex as the case may be). One skilled in the art can ascertain a tolerable degree of mismatch by use of standard procedures to determine the melting point of the hybridized complex.

[0771] Oligonucleotides that are complementary to the 5′ end of the message, e.g., the 5′ untranslated sequence up to and including the AUG initiation codon, should work most efficiently at inhibiting translation. However, sequences complementary to the 3′ untranslated sequences-of mRNAs have been shown to be effective at inhibiting translation of mRNAs as well. See generally, Wagner, R., 1994, Nature 372:333-335. Thus, oligonucleotides complementary to either the 5′- or 3′- non-translated, non-coding regions of polynucleotide sequences described herein could be used in an antisense approach to inhibit translation of endogenous mRNA. Oligonucleotides complementary to the 5′ untranslated region of the mRNA should include the complement of the AUG start codon. Antisense oligonucleotides complementary to mRNA coding regions are less efficient inhibitors of translation but could be used in accordance with the invention. Whether designed to hybridize to the 5′-, 3′- or coding region of mRNA of the present invention, antisense nucleic acids should be at least six nucleotides in length, and are preferably oligonucleotides ranging from 6 to about 50 nucleotides in length. In specific aspects the oligonucleotide is at least 10 nucleotides, at least 17 nucleotides, at least 25 nucleotides or at least 50 nucleotides.

[0772] The polynucleotides of the invention can be DNA or RNA or chimeric mixtures or derivatives or modified versions thereof, single-stranded or double-stranded. The oligonucleotide can be modified at the base moiety, sugar moiety, or phosphate backbone, for example, to improve stability of the molecule, hybridization, etc. The oligonucleotide may include other appended groups such as peptides (e.g., for targeting host cell receptors in vivo), or agents facilitating transport across the cell membrane (see, e.g., Letsinger et al., 1989, Proc. Natl. Acad. Sci. U.S.A. 86:6553-6556; Lemaitre et al., 1987, Proc. Natl. Acad. Sci. 84:648-652; PCT Publication No. WO88/09810, published Dec. 15, 1988) or the blood-brain barrier (see, e.g., PCT Publication No. WO89/10134, published Apr. 25, 1988), hybridization-triggered cleavage agents. (See, e.g., Krol et al., 1988, BioTechniques 6:958-976) or intercalating agents. (See, e.g., Zon, 1988, Pharm. Res. 5:539-549). To this end, the oligonucleotide may be conjugated to another molecule, e.g., a peptide, hybridization triggered cross-linking agent, transport agent, hybridization-triggered cleavage agent, etc.

[0773] The antisense oligonucleotide may comprise at least one modified base moiety which is selected from the group including, but not limited to, 5-fluorouracil, 5-bromouracil, 5-chlorouracil, 5-iodouracil, hypoxanthine, xantine, 4-acetylcytosine, 5-(carboxyhydroxylmethyl) uracil, 5-carboxymethylaminomethyl-2-thiouridine, 5-carboxymethylaminomethyluracil, dihydrouracil, beta-D-galactosylqueosine, inosine, N6-isopentenyladenine, 1-methylguanine, 1-methylinosine, 2,2-dimethylguanine, 2-methyladenine, 2-methylguanine, 3-methylcytosine, 5-methylcytosine, N6-adenine, 7-methylguanine, 5-methylaminomethyluracil, 5-methoxyaminomethyl-2-thiouracil, beta-D-mannosylqueosine, 5′-methoxycarboxymethyluracil, 5-methoxyuracil, 2-methylthio-N6-isopentenyladenine, uracil-5-oxyacetic acid (v), wybutoxosine, pseudouracil, queosine, 2-thiocytosine, 5-methyl-2-thiouracil, 2-thiouracil, 4-thiouracil, 5-methyluracil, uracil-5-oxyacetic acid methylester, uracil-5-oxyacetic acid (v), 5-methyl-2-thiouracil, 3-(3-amino-3-N-2-carboxypropyl) uracil, (acp3)w, and 2,6-diaminopurine.

[0774] The antisense oligonucleotide may also comprise at least one modified sugar moiety selected from the group including, but not limited to, arabinose, 2-fluoroarabinose, xylulose, and hexose.

[0775] In yet another embodiment, the antisense oligonucleotide comprises at least one modified phosphate backbone selected from the group including, but not limited to, a phosphorothioate, a phosphorodithioate, a phosphoramidothioate, a phosphoramidate, a phosphordiamidate, a methylphosphonate, an alkyl phosphotriester, and a formacetal or analog thereof.

[0776] In yet another embodiment, the antisense oligonucleotide is an a-anomeric oligonucleotide. An a-anomeric oligonucleotide forms specific double-stranded hybrids with complementary RNA in which, contrary to the usual b-units, the strands run parallel to each other (Gautier et al., 1987, Nucl. Acids Res. 15:6625-6641). The oligonucleotide is a 2′-0-methylribonucleotide (Inoue et al., 1987, Nucl. Acids Res. 15:6131-6148), or a chimeric RNA-DNA analogue (Inoue et al., 1987, FEBS Lett. 215:327-330).

[0777] Polynucleotides of the invention may be synthesized by standard methods known in the art, e.g. by use of an automated DNA synthesizer (such as are commercially available from Biosearch, Applied Biosystems, etc.). As examples, phosphorothioate oligonucleotides may be synthesized by the method of Stein et al. (1988, Nucl. Acids Res. 16:3209), methylphosphonate oligonucleotides can be prepared by use of controlled pore glass polymer supports (Sarin et al., 1988, Proc. Natl. Acad. Sci. U.S.A. 85:7448-7451), etc.

[0778] While antisense nucleotides complementary to the coding region sequence could be used, those complementary to the transcribed untranslated region are most preferred.

[0779] Potential antagonists according to the invention also include catalytic RNA, or a ribozyme (See, e.g., PCT International Publication WO 90/11364, published Oct. 4, 1990; Sarver et al, Science 247:1222-1225 (1990). While ribozymes that cleave mRNA at site specific recognition sequences can be used to destroy mRNAs, the use of hammerhead ribozymes is preferred. Hammerhead ribozymes cleave mRNAs at locations dictated by flanking regions that form complementary base pairs with the target mRNA. The sole requirement is that the target mRNA have the following sequence of two bases: 5′-UG-3′. The construction and production of hammerhead ribozymes is well known in the art and is described more fully in Haseloff and Gerlach, Nature 334:585-591 (1988). There are numerous potential hammerhead ribozyme cleavage sites within the nucleotide sequence of SEQ ID NO:X. Preferably, the ribozyme is engineered so that the cleavage recognition site is located near the 5′ end of the mRNA; i.e., to increase efficiency and minimize the intracellular accumulation of non-functional mRNA transcripts.

[0780] As in the antisense approach, the ribozymes of the invention can be composed of modified oligonucleotides (e.g., for improved stability, targeting, etc.) and should be delivered to cells which express in vivo. DNA constructs encoding the ribozyme may be introduced into the cell in the same manner as described above for the introduction of antisense encoding DNA. A preferred method of delivery involves using a DNA construct “encoding” the ribozyme under the control of a strong constitutive promoter, such as, for example, pol III or pol II promoter, so that transfected cells will produce sufficient quantities of the ribozyme to destroy endogenous messages and inhibit translation. Since ribozymes unlike antisense molecules, are catalytic, a lower intracellular concentration is required for efficiency.

[0781] Antagonist/agonist compounds may be employed to inhibit the cell growth and proliferation effects of the polypeptides of the present invention on neoplastic cells and tissues, i.e. stimulation of angiogenesis of tumors, and, therefore, retard or prevent abnormal cellular growth and proliferation, for example, in tumor formation or growth.

[0782] The antagonist/agonist may also be employed to prevent hyper-vascular diseases, and prevent the proliferation of epithelial lens cells after extracapsular cataract surgery. Prevention of the mitogenic activity of the polypeptides of the present invention may also be desirous in cases such as restenosis after balloon angioplasty.

[0783] The antagonist/agonist may also be employed to prevent the growth of scar tissue during wound healing.

[0784] The antagonist/agonist may also be employed to treat the diseases described herein.

[0785] Thus, the invention provides a method of treating disorders or diseases, including but not limited to the disorders or diseases listed throughout this application, associated with overexpression of a polynucleotide of the present invention by administering to a patient (a) an antisense molecule directed to the polynucleotide of the present invention, and/or (b) a ribozyme directed to the polynucleotide of the present invention.

[0786] Binding Peptides and Other Molecules

[0787] The invention also encompasses screening methods for identifying polypeptides and nonpolypeptides that bind polypeptides of the invention, and the binding molecules identified thereby. These binding molecules are useful, for example, as agonists and antagonists of the polypeptides of the invention. Such agonists and antagonists can be used, in accordance with the invention, in the therapeutic embodiments described in detail, below.

[0788] This method comprises the steps of:

[0789] a. contacting polypeptides of the invention with a plurality of molecules; and

[0790] b. identifying a molecule that binds the polypeptides of the invention.

[0791] The step of contacting the polypeptides of the invention with the plurality of molecules may be effected in a number of ways. For example, one may contemplate immobilizing the polypeptides on a solid support and bringing a solution of the plurality of molecules in contact with the immobilized polypeptides. Such a procedure would be akin to an affinity chromatographic process, with the affinity matrix being comprised of the immobilized polypeptides of the invention. The molecules having a selective affinity for the polypeptides can then be purified by affinity selection. The nature of the solid support, process for attachment of the polypeptides to the solid support, solvent, and conditions of the affinity isolation or selection are largely conventional and well known to those of ordinary skill in the art.

[0792] Alternatively, one may also separate a plurality of polypeptides into substantially-separate fractions comprising a subset of or individual polypeptides. For instance, one can separate the plurality of polypeptides by gel electrophoresis, column chromatography, or like method known to those of ordinary skill for the separation of polypeptides. The individual polypeptides can also be produced by a transformed host cell in such a way as to be expressed on or about its outer surface (e.g., a recombinant phage). Individual isolates can then be “probed” by the polypeptides of the invention, optionally in the presence of an inducer should one be required for expression, to determine if any selective affinity interaction takes place between the polypeptides and the individual clone. Prior to contacting the polypeptides with each fraction comprising individual polypeptides, the polypeptides could first be transferred to a solid support for additional convenience. Such a solid support may simply be a piece of filter membrane, such as one made of nitrocellulose or nylon. In this manner, positive clones could be identified from a collection of transformed host cells of an expression library, which harbor a DNA construct encoding a polypeptide having a selective affinity for polypeptides of the invention. Furthermore, the amino acid sequence of the polypeptide having a selective affinity for the polypeptides of the invention can be determined directly by conventional means or the coding sequence of the DNA encoding the polypeptide can frequently be determined more conveniently. The primary sequence can then be deduced from the corresponding DNA sequence. If the amino acid sequence is to be determined from the polypeptide itself, one may use microsequencing techniques. The sequencing technique may include mass spectroscopy.

[0793] In certain situations, it may be desirable to wash away any unbound polypeptides from a mixture of the polypeptides of the invention and the plurality of polypeptides prior to attempting to determine or to detect the presence of a selective affinity interaction. Such a wash step may be particularly desirable when the polypeptides of the invention or the plurality of polypeptides are bound to a solid support.

[0794] The plurality of molecules provided according to this method may be provided by way of diversity libraries, such as random or combinatorial peptide or nonpeptide libraries which can be screened for molecules that specifically bind polypeptides of the invention. Many libraries are known in the art that can be used, e.g., chemically synthesized libraries, recombinant (e.g., phage display libraries), and in vitro translation-based libraries. Examples of chemically synthesized libraries are described in Fodor et al., 1991, Science 251:767-773; Houghten et al., 1991, Nature 354:84-86; Lam et al., 1991, Nature 354:82-84; Medynski, 1994, Bio/Technology 12:709-710;Gallop et al., 1994, J. Medicinal Chemistry 37(9):1233-1251; Ohlmeyer et al., 1993, Proc. Natl. Acad. Sci. USA 90:10922-10926; Erb et al., 1994, Proc. Natl. Acad. Sci. USA 91:11422-11426; Houghten et al., 1992, Biotechniques 13:412; Jayawickreme et al., 1994, Proc. Natl. Acad. Sci. USA 91:1614-1618; Salmon et al., 1993, Proc. Natl. Acad. Sci. USA 90:11708-11712; PCT Publication No. WO 93/20242; and Brenner and Lemer, 1992, Proc. Natl. Acad. Sci. USA 89:5381-5383.

[0795] Examples of phage display libraries are described in Scott and Smith, 1990, Science 249:386-390; Devlin et al., 1990, Science, 249:404-406; Christian, R. B., et al., 1992, J. Mol. Biol. 227:711-718); Lenstra, 1992, J. Immunol. Meth. 152:149-157; Kay et al., 1993, Gene 128:59-65; and PCT Publication No. WO 94/18318 dated Aug. 18, 1994.

[0796] In vitro translation-based libraries include but are not limited to those described in PCT Publication No. WO 91/05058 dated Apr. 18, 1991; and Mattheakis et al., 1994, Proc. Natl. Acad. Sci. USA 91:9022-9026.

[0797] By way of examples of nonpeptide libraries, a benzodiazepine library (see e.g., Bunin et al., 1994, Proc. Natl. Acad. Sci. USA 91:4708-4712) can be adapted for use. Peptoid libraries (Simon et al., 1992, Proc. Natl. Acad. Sci. USA 89:9367-9371) can also be used. Another example of a library that can be used, in which the amide functionalities in peptides have been permethylated to generate a chemically transformed combinatorial library, is described by Ostresh et al. (1994, Proc. Natl. Acad. Sci. USA 91:11138-11142).

[0798] The variety of non-peptide libraries that are useful in the present invention is great. For example, Ecker and Crooke, 1995, Bio/Technology 13:351-360 list benzodiazepines, hydantoins, piperazinediones, biphenyls, sugar analogs, beta-mercaptoketones, arylacetic acids, acylpiperidines, benzopyrans, cubanes, xanthines, aminimides, and oxazolones as among the chemical species that form the basis of various libraries.

[0799] Non-peptide libraries can be classified broadly into two types: decorated monomers and oligomers. Decorated monomer libraries employ a relatively simple scaffold structure upon which a variety functional groups is added. Often the scaffold will be a molecule with a known useful pharmacological activity. For example, the scaffold might be the benzodiazepine structure.

[0800] Non-peptide oligomer libraries utilize a large number of monomers that are assembled together in ways that create new shapes that depend on the order of the monomers. Among the monomer units that have been used are carbamates, pyrrolinones, and morpholinos. Peptoids, peptide-like oligomers in which the side chain is attached to the alpha amino group rather than the alpha carbon, form the basis of another version of non-peptide oligomer libraries. The first non-peptide oligomer libraries utilized a single type of monomer and thus contained a repeating backbone. Recent libraries have utilized more than one monomer, giving the libraries added flexibility.

[0801] Screening the libraries can be accomplished by any of a variety of commonly known methods. See, e.g., the following references, which disclose screening of peptide libraries: Parmley and Smith, 1989, Adv. Exp. Med. Biol. 251:215-218; Scott and Smith, 1990, Science 249:386-390; Fowlkes et al., 1992; BioTechniques 13:422-427; Oldenburg et al., 1992, Proc. Natl. Acad. Sci. USA 89:5393-5397; Yu et al., 1994, Cell 76:933-945; Staudt et al., 1988, Science 241:577-580; Bock et al., 1992, Nature 355:564-566; Tuerk et al., 1992, Proc. Natl. Acad. Sci. USA 89:6988-6992; Ellington et al., 1992, Nature 355:850-852; U.S. Pat. Nos. 5,096,815, 5,223,409, and 5,198,346, all to Ladner et al.; Rebar and Pabo, 1993, Science 263:671-673; and CT Publication No. WO 94/18318.

[0802] In a specific embodiment, screening to identify a molecule that binds polypeptides of the invention can be carried out by contacting the library members with polypeptides of the invention immobilized on a solid phase and harvesting those library members that bind to the polypeptides of the invention. Examples of such screening methods, termed “panning” techniques are described by way of example in Parmley and Smith, 1988, Gene 73:305-318; Fowlkes et al., 1992, BioTechniques 13:422-427; PCT Publication No. WO 94/18318; and in references cited herein.

[0803] In another embodiment, the two-hybrid system for selecting interacting proteins in yeast (Fields and Song, 1989, Nature 340:245-246; Chien et al., 1991, Proc. Natl. Acad. Sci. USA 88:9578-9582) can be used to identify molecules that specifically bind to polypeptides of the invention.

[0804] Where the binding molecule is a polypeptide, the polypeptide can be conveniently selected from any peptide library, including random peptide libraries, combinatorial peptide libraries, or biased peptide libraries. The term “biased” is used herein to mean that the method of generating the library is manipulated so as to restrict one or more parameters that govern the diversity of the resulting collection of molecules, in this case peptides.

[0805] Thus, a truly random peptide library would generate a collection of peptides in which the probability of finding a particular amino acid at a given position of the peptide is the same for all 20 amino acids. A bias can be introduced into the library, however, by specifying, for example, that a lysine occur every fifth amino acid or that positions 4, 8, and 9 of a decapeptide library be fixed to include only arginine. Clearly, many types of biases can be contemplated, and the present invention is not restricted to any particular bias. Furthermore, the present invention contemplates specific types of peptide libraries, such as phage displayed peptide libraries and those that utilize a DNA construct comprising a lambda phage vector with a DNA insert.

[0806] As mentioned above, in the case of a binding molecule that is a polypeptide, the polypeptide may have about 6 to less than about 60 amino acid residues, preferably about 6 to about 10 amino acid residues, and most preferably, about 6 to about 22 amino acids. In another embodiment, a binding polypeptide has in the range of 15-100 amino acids, or 20-50 amino acids.

[0807] The selected binding polypeptide can be obtained by chemical synthesis or recombinant expression.

[0808] Other Activities

[0809] A polypeptide, polynucleotide, agonist, or antagonist of the present invention, as a result of the ability to stimulate vascular endothelial cell growth, may be employed in treatment for stimulating re-vascularization of ischemic tissues due to various disease conditions such as thrombosis, arteriosclerosis, and other cardiovascular conditions. The polypeptide, polynucleotide, agonist, or antagonist of the present invention may also be employed to stimulate angiogenesis and limb regeneration, as discussed above.

[0810] A polypeptide, polynucleotide, agonist, or antagonist of the present invention may also be employed for treating wounds due to injuries, burns, post-operative tissue repair, and ulcers since they are mitogenic to various cells of different origins, such as fibroblast cells and skeletal muscle cells, and therefore, facilitate the repair or replacement of damaged or diseased tissue.

[0811] A polypeptide, polynucleotide, agonist, or antagonist of the present invention may also be employed stimulate neuronal growth and to treat and prevent neuronal damage which occurs in certain neuronal disorders or neuro-degenerative conditions such as Alzheimer's disease, Parkinson's disease, and AIDS-related complex. A polypeptide, polynucleotide, agonist, or antagonist of the present invention may have the ability to stimulate chondrocyte growth, therefore, they may be employed to enhance bone and periodontal regeneration and aid in tissue transplants or bone grafts.

[0812] A polypeptide, polynucleotide, agonist, or antagonist of the present invention may be also be employed to prevent skin aging due to sunburn by stimulating keratinocyte growth.

[0813] A polypeptide, polynucleotide, agonist, or antagonist of the present invention may also be employed for preventing hair loss, since FGF family members activate hair-forming cells and promotes melanocyte growth. Along the same lines, a polypeptide, polynucleotide, agonist, or antagonist of the present invention may be employed to stimulate growth and differentiation of hematopoietic cells and bone marrow cells when used in combination with other cytokines.

[0814] A polypeptide, polynucleotide, agonist, or antagonist of the present invention may also be employed to maintain organs before transplantation or for supporting cell culture of primary tissues. A polypeptide, polynucleotide, agonist, or antagonist of the present invention may also be employed for inducing tissue of mesodermal origin to differentiate in early embryos.

[0815] A polypeptide, polynucleotide, agonist, or antagonist of the present invention may also increase or decrease the differentiation or proliferation of embryonic stem cells, besides, as discussed above, hematopoietic lineage.

[0816] A polypeptide, polynucleotide, agonist, or antagonist of the present invention may also be used to modulate mammalian characteristics, such as body height, weight, hair color, eye color, skin, percentage of adipose tissue, pigmentation, size, and shape (e.g., cosmetic surgery). Similarly, a polypeptide, polynucleotide, agonist, or antagonist of the present invention may be used to modulate mammalian metabolism affecting catabolism, anabolism, processing, utilization, and storage of energy.

[0817] A polypeptide, polynucleotide, agonist, or antagonist of the present invention may be used to change a mammal's mental state or physical state by influencing biorhythms, caricadic rhythms, depression (including depressive disorders), tendency for violence, tolerance for pain, reproductive capabilities (preferably by Activin or Inhibin-like activity), hormonal or endocrine levels, appetite, libido, memory, stress, or other cognitive qualities.

[0818] A polypeptide, polynucleotide, agonist, or antagonist of the present invention may also be used as a food additive or preservative, such as to increase or decrease storage capabilities, fat content, lipid, protein, carbohydrate, vitamins, minerals, cofactors or other nutritional components.

[0819] The above-recited applications have uses in a wide variety of hosts. Such hosts include, but are not limited to, human, murine, rabbit, goat, guinea pig, camel, horse, mouse, rat, hamster, pig, micro-pig, chicken, goat, cow, sheep, dog, cat, non-human primate, and human. In specific embodiments, the host is a mouse, rabbit, goat, guinea pig, chicken, rat, hamster, pig, sheep, dog or cat. In preferred embodiments, the host is a mammal. In most preferred embodiments, the host is a human.

[0820] Other Preferred Embodiments

[0821] Other preferred embodiments of the claimed invention include an isolated nucleic acid molecule comprising a nucleotide sequence which is at least 95% identical to a sequence of at least about 50 contiguous nucleotides in the nucleotide sequence of SEQ ID NO:X or the complementary strand thereto, the nucleotide sequence as defined in column 5 of Table 1A or columns 8 and 9 of Table 2 or the complementary strand thereto, and/or cDNA contained in Clone ID NO:Z.

[0822] Also preferred is a nucleic acid molecule wherein said sequence of contiguous nucleotides is included in the nucleotide sequence of the portion of SEQ ID NO:X as defined in column 5, “ORF (From-To)”, in Table 1A.

[0823] Also preferred is a nucleic acid molecule wherein said sequence of contiguous nucleotides is included in the nucleotide sequence of the portion of SEQ ID NO:X as defined in columns 8 and 9, “NT From” and “NT To” respectively, in Table 2.

[0824] Also preferred is an isolated nucleic acid molecule comprising a nucleotide sequence which is at least 95% identical to a sequence of at least about 150 contiguous nucleotides in the nucleotide sequence of SEQ ID NO:X or the complementary strand thereto, the nucleotide sequence as defined in column 5 of Table 1A or columns 8 and 9 of Table 2 or the complementary strand thereto, and/or cDNA contained in Clone ID NO:Z.

[0825] Further preferred is an isolated nucleic acid molecule comprising a nucleotide sequence which is at least 95% identical to a sequence of at least about 500 contiguous nucleotides in the nucleotide sequence of SEQ ID NO:X or the complementary strand thereto, the nucleotide sequence as defined in column 5 of Table 1A or columns 8 and 9 of Table 2 or the complementary strand thereto, and/or cDNA contained in Clone ID NO:Z.

[0826] A further preferred embodiment is a nucleic acid molecule comprising a nucleotide sequence which is at least 95% identical to the nucleotide sequence of the portion of SEQ ID NO:X defined in column 5, “ORF (From-To)”, in Table 1A.

[0827] A further preferred embodiment is a nucleic acid molecule comprising a nucleotide sequence which is at least 95% identical to the nucleotide sequence of the portion of SEQ ID NO:X defined in columns 8 and 9, “NT From” and “NT To”, respectively, in Table 2.

[0828] A further preferred embodiment is an isolated nucleic acid molecule comprising a nucleotide sequence which is at least 95% identical to the complete nucleotide sequence of SEQ ID NO:X or the complementary strand thereto, the nucleotide sequence as defined in column 5 of Table 1A or columns 8 and 9 of Table 2 or the complementary strand thereto, and/or cDNA contained in Clone ID NO:Z.

[0829] Also preferred is an isolated nucleic acid molecule which hybridizes under stringent hybridization conditions to a nucleic acid molecule comprising a nucleotide sequence of SEQ ID NO:X or the complementary strand thereto, the nucleotide sequence as defined in column 5 of Table 1A or columns 8 and 9 of Table 2 or the complementary strand thereto, and/or cDNA contained in Clone ID NO:Z, wherein said nucleic acid molecule which hybridizes does not hybridize under stringent hybridization conditions to a nucleic acid molecule having a nucleotide sequence consisting of only A residues or of only T residues.

[0830] Also preferred is a composition of matter comprising a DNA molecule which comprises the cDNA contained in Clone ID NO:Z.

[0831] Also preferred is an isolated nucleic acid molecule comprising a nucleotide sequence which is at least 95% identical to a sequence of at least 50 contiguous nucleotides of the cDNA sequence contained in Clone ID NO:Z.

[0832] Also preferred is an isolated nucleic acid molecule, wherein said sequence of at least 50 contiguous nucleotides is included in the nucleotide sequence of an open reading frame sequence encoded by cDNA contained in Clone ID NO:Z.

[0833] Also preferred is an isolated nucleic acid molecule comprising a nucleotide sequence which is at least 95% identical to sequence of at least 150 contiguous nucleotides in the nucleotide sequence encoded by cDNA contained in Clone ID NO:Z.

[0834] A further preferred embodiment is an isolated nucleic acid molecule comprising a nucleotide sequence which is at least 95% identical to sequence of at least 500 contiguous nucleotides in the nucleotide sequence encoded by cDNA contained in Clone ID NO:Z.

[0835] A further preferred embodiment is an isolated nucleic acid molecule comprising a nucleotide sequence which is at least 95% identical to the complete nucleotide sequence encoded by cDNA contained in Clone ID NO:Z.

[0836] A further preferred embodiment is a method for detecting in a biological sample a nucleic acid molecule comprising a nucleotide sequence which is at least 95% identical to a sequence of at least 50 contiguous nucleotides in a sequence selected from the group consisting of: a nucleotide sequence of SEQ ID NO:X or the complementary strand thereto; the nucleotide sequence as defined in column 5 of Table 1A or columns 8 and 9 of Table 2 or the complementary strand thereto; and a nucleotide sequence encoded by cDNA contained in Clone ID NO:Z; which method comprises a step of comparing a nucleotide sequence of at least one nucleic acid molecule in said sample with a sequence selected from said group and determining whether the sequence of said nucleic acid molecule in said sample is at least 95% identical to said selected sequence.

[0837] Also preferred is the above method wherein said step of comparing sequences comprises determining the extent of nucleic acid hybridization between nucleic acid molecules in said sample and a nucleic acid molecule comprising said sequence selected from said group. Similarly, also preferred is the above method wherein said step of comparing sequences is performed by comparing the nucleotide sequence determined from a nucleic acid molecule in said sample with said sequence selected from said group. The nucleic acid molecules can comprise DNA molecules or RNA molecules.

[0838] A further preferred embodiment is a method for identifying the species, tissue or cell type of a biological sample which method comprises a step of detecting nucleic acid molecules in said sample, if any, comprising a nucleotide sequence that is at least 95% identical to a sequence of at least 50 contiguous nucleotides in a sequence selected from the group consisting of: a nucleotide sequence of SEQ ID NO:X or the complementary strand thereto; the nucleotide sequence as defined in column 5 of Table 1A or columns 8 and 9 of Table 2 or the complementary strand thereto; and a nucleotide sequence of the cDNA contained in Clone ID NO:Z.

[0839] The method for identifying the species, tissue or cell type of a biological sample can comprise a step of detecting nucleic acid molecules comprising a nucleotide sequence in a panel of at least two nucleotide sequences, wherein at least one sequence in said panel is at least 95% identical to a sequence of at least 50 contiguous nucleotides in a sequence selected from said group.

[0840] Also preferred is a method for diagnosing in a subject a pathological condition associated with abnormal structure or expression of a nucleotide sequence of SEQ ID NO:X or the complementary strand thereto; the nucleotide sequence as defined in column 5 of Table 1A or columns 8 and 9 of Table 2 or the complementary strand thereto; or the cDNA contained in Clone ID NO:Z which encodes a protein, wherein the method comprises a step of detecting in a biological sample obtained from said subject nucleic acid molecules, if any, comprising a nucleotide sequence that is at least 95% identical to a sequence of at least 50 contiguous nucleotides in a sequence selected from the group consisting of: a nucleotide sequence of SEQ ID NO:X or the complementary strand thereto; the nucleotide sequence as defined in column 5 of Table 1A or columns 8 and 9 of Table 2 or the complementary strand thereto; and a nucleotide sequence of cDNA contained in Clone ID NO:Z.

[0841] The method for diagnosing a pathological condition can comprise a step of detecting nucleic acid molecules comprising a nucleotide sequence in a panel of at least two nucleotide sequences, wherein at least one sequence in said panel is at least 95% identical to a sequence of at least 50 contiguous nucleotides in a sequence selected from said group.

[0842] Also preferred is a composition of matter comprising isolated nucleic acid molecules wherein the nucleotide sequences of said nucleic acid molecules comprise a panel of at least two nucleotide sequences, wherein at least one sequence in said panel is at least 95% identical to a sequence of at least 50 contiguous nucleotides in a sequence selected from the group consisting of: a nucleotide sequence of SEQ ID NO:X or the complementary strand thereto; the nucleotide sequence as defined in column 5 of Table 1A or columns 8 and 9 of Table 2 or the complementary strand thereto; and a nucleotide sequence encoded by cDNA contained in Clone ID NO:Z. The nucleic acid molecules can comprise DNA molecules or RNA molecules.

[0843] Also, preferred is a composition of matter comprising isolated nucleic acid molecules wherein the nucleotide sequences of said nucleic acid molecules comprise a DNA microarray or “chip” of at least 1, 2, 3, 4, 5, 6, 7, 8, 9, 10, 15, 20, 25, 30, 40, 50, 100, 150, 200, 250, 300, 500, 1000, 2000, 3000, or 4000 nucleotide sequences, wherein at least one sequence in said DNA microarray or “chip” is at least 95% identical to a sequence of at least 50 contiguous nucleotides in a sequence selected from the group consisting of: a nucleotide sequence of SEQ ID NO:X wherein X is any integer as defined in Table 1A; and a nucleotide sequence encoded by a human cDNA clone identified by a cDNA “Clone ID” in Table 1A.

[0844] Also preferred is an isolated polypeptide comprising an amino acid sequence at least 90% identical to a sequence of at least about 10 contiguous amino acids in the polypeptide sequence of SEQ ID NO:Y; a polypeptide encoded by SEQ ID NO:X or the complementary strand thereto; the polypeptide encoded by the nucleotide sequence as defined in columns 8 and 9 of Table 2; and/or a polypeptide encoded by cDNA contained in Clone ID NO:Z.

[0845] Also preferred is an isolated polypeptide comprising an amino acid sequence at least 95% identical to a sequence of at least about 30 contiguous amino acids in the amino acid sequence of SEQ ID NO:Y; a polypeptide encoded by SEQ ID NO:X or the complementary strand thereto; the polypeptide encoded by the nucleotide sequence as defined in columns 8 and 9 of Table 2; and/or a polypeptide encoded by cDNA contained in Clone ID NO:Z.

[0846] Further preferred is an isolated polypeptide comprising an amino acid sequence at least 95% identical to a sequence of at least about 100 contiguous amino acids in the amino acid sequence of SEQ ID NO:Y; a polypeptide encoded by SEQ ID NO:X or the complementary strand thereto; the polypeptide encoded by the nucleotide sequence as defined in columns 8 and 9 of Table 2; and/or a polypeptide encoded by cDNA contained in Clone ID NO:Z.

[0847] Further preferred is an isolated polypeptide comprising an amino acid sequence at least 95% identical to the complete amino acid sequence of SEQ ID NO:Y; a polypeptide encoded by SEQ ID NO:X or the complementary strand thereto; the polypeptide encoded by the nucleotide sequence as defined in columns 8 and 9 of Table 2; and/or a polypeptide encoded by cDNA contained in Clone ID NO:Z.

[0848] Further preferred is an isolated polypeptide comprising an amino acid sequence at least 90% identical to a sequence of at least about 10 contiguous amino acids in the complete amino acid sequence of a polypeptide encoded by contained in Clone ID NO:Z

[0849] Also preferred is a polypeptide wherein said sequence of contiguous amino acids is included in the amino acid sequence of a portion of said polypeptide encoded by cDNA contained in Clone ID NO:Z; a polypeptide encoded by SEQ ID NO:X or the complementary strand thereto; the polypeptide encoded by the nucleotide sequence as defined in columns 8 and 9 of Table 2; and/or the polypeptide sequence of SEQ ID NO:Y.

[0850] Also preferred is an isolated polypeptide comprising an amino acid sequence at least 95% identical to a sequence of at least about 30 contiguous amino acids in the amino acid sequence of a polypeptide encoded by the cDNA contained in Clone ID NO:Z.

[0851] Also preferred is an isolated polypeptide comprising an amino acid sequence at least 95% identical to a sequence of at least about 100 contiguous amino acids in the amino acid sequence of a polypeptide encoded by cDNA contained in Clone ID NO:Z.

[0852] Also preferred is an isolated polypeptide comprising an amino acid sequence at least 95% identical to the amino acid sequence of a polypeptide encoded by the cDNA contained in Clone ID NO:Z.

[0853] Further preferred is an isolated antibody which binds specifically to a polypeptide comprising an amino acid sequence that is at least 90% identical to a sequence of at least 10 contiguous amino acids in a sequence selected from the group consisting of a polypeptide sequence of SEQ ID NO:Y; a polypeptide encoded by SEQ ID NO:X or the complementary strand thereto; the polypeptide encoded by the nucleotide sequence as defined in columns 8 and 9 of Table 2; and a polypeptide encoded by the cDNA contained in Clone ID NO:Z.

[0854] Further preferred is a method for detecting in a biological sample a polypeptide comprising an amino acid sequence which is at least 90% identical to a sequence of at least 10 contiguous amino acids in a sequence selected from the group consisting of: a polypeptide sequence of SEQ ID NO:Y; a polypeptide encoded by SEQ ID NO:X or the complementary strand thereto; the polypeptide encoded by the nucleotide sequence as defined in columns 8 and 9 of Table 2; and a polypeptide encoded by the cDNA contained in Clone ID NO:Z; which method comprises a step of comparing an amino acid sequence of at least one polypeptide molecule in said sample with a sequence selected from said group and determining whether the sequence of said polypeptide molecule in said sample is at least 90% identical to said sequence of at least 10 contiguous amino acids.

[0855] Also preferred is the above method wherein said step of comparing an amino acid sequence of at least one polypeptide molecule in said sample with a sequence selected from said group comprises determining the extent of specific binding of polypeptides in said sample to an antibody which binds specifically to a polypeptide comprising an amino acid sequence that is at least 90% identical to a sequence of at least 10 contiguous amino acids in a sequence selected from the group consisting of: a polypeptide sequence of SEQ ID NO:Y; a polypeptide encoded by SEQ ID NO:X or the complementary strand thereto; the polypeptide encoded by the nucleotide sequence as defined in columns 8 and 9 of Table 2; and a polypeptide encoded by the cDNA contained in Clone ID NO:Z.

[0856] Also preferred is the above method wherein said step of comparing sequences is performed by comparing the amino acid sequence determined from a polypeptide molecule in said sample with said sequence selected from said group.

[0857] Also preferred is a method for identifying the species, tissue or cell type of a biological sample which method comprises a step of detecting polypeptide molecules in said sample, if any, comprising an amino acid sequence that is at least 90% identical to a sequence of at least 10 contiguous amino acids in a sequence selected from the group consisting of: polypeptide sequence of SEQ ID NO:Y; a polypeptide encoded by SEQ ID NO:X or the complementary strand thereto; the polypeptide encoded by the nucleotide sequence as defined in columns 8 and 9 of Table 2; and a polypeptide encoded by the cDNA contained in Clone ID NO:Z.

[0858] Also preferred is the above method for identifying the species, tissue or cell type of a biological sample, which method comprises a step of detecting polypeptide molecules comprising an amino acid sequence in a panel of at least two amino acid sequences, wherein at least one sequence in said panel is at least 90% identical to a sequence of at least 10 contiguous amino acids in a sequence selected from the above group.

[0859] Also preferred is a method for diagnosing in a subject a pathological condition associated with abnormal structure or expression of a nucleic acid sequence identified in Table 1A or Table 2 encoding a polypeptide, which method comprises a step of detecting in a biological sample obtained from said subject polypeptide molecules comprising an amino acid sequence in a panel of at least two amino acid sequences, wherein at least one sequence in said panel is at least 90% identical to a sequence of at least 10 contiguous amino acids in a sequence selected from the group consisting of: polypeptide sequence of SEQ ID NO:Y; a polypeptide encoded by SEQ ID NO:X or the complementary strand thereto; the polypeptide encoded by the nucleotide sequence as defined in columns 8 and 9 of Table 2; and a polypeptide encoded by the cDNA contained in Clone ID NO:Z.

[0860] In any of these methods, the step of detecting said polypeptide molecules includes using an antibody.

[0861] Also preferred is an isolated nucleic acid molecule comprising a nucleotide sequence which is at least 95% identical to a nucleotide sequence encoding a polypeptide wherein said polypeptide comprises an amino acid sequence that is at least 90% identical to a sequence of at least 10 contiguous amino acids in a sequence selected from the group consisting of: polypeptide sequence of SEQ ID NO:Y; a polypeptide encoded by SEQ ID NO:X or the complementary strand thereto; the polypeptide encoded by the nucleotide sequence as defined in columns 8 and 9 of Table 2; and a polypeptide encoded by the cDNA contained in Clone ID NO:Z.

[0862] Also preferred is an isolated nucleic acid molecule, wherein said nucleotide sequence encoding a polypeptide has been optimized for expression of said polypeptide in a prokaryotic host.

[0863] Also preferred is a polypeptide molecule, wherein said polypeptide comprises an amino acid sequence selected from the group consisting of: polypeptide sequence of SEQ ID NO:Y; a polypeptide encoded by SEQ ID NO:X or the complementary strand thereto; the polypeptide encoded by the nucleotide sequence as defined in columns 8 and 9 of Table 2; and a polypeptide encoded by the cDNA contained in Clone ID NO:Z.

[0864] Further preferred is a method of making a recombinant vector comprising inserting any of the above isolated nucleic acid molecule into a vector. Also preferred is the recombinant vector produced by this method. Also preferred is a method of making a recombinant host cell comprising introducing the vector into a host cell, as well as the recombinant host cell produced by this method.

[0865] Also preferred is a method of making an isolated polypeptide comprising culturing this recombinant host cell under conditions such that said polypeptide is expressed and recovering said polypeptide. Also preferred is this method of making an isolated polypeptide, wherein said recombinant host cell is a eukaryotic cell and said polypeptide is a human protein comprising an amino acid sequence selected from the group consisting of polypeptide sequence of SEQ ID NO:Y; a polypeptide encoded by SEQ ID NO:X or the complementary strand thereto; the polypeptide encoded by the nucleotide sequence as defined in columns 8 and 9 of Table 2; and a polypeptide encoded by the cDNA contained in Clone ID NO:Z. The isolated polypeptide produced by this method is also preferred.

[0866] Also preferred is a method of treatment of an individual in need of an increased level of a protein activity, which method comprises administering to such an individual a Therapeutic comprising an amount of an isolated polypeptide, polynucleotide, immunogenic fragment or analogue thereof, binding agent, antibody, or antigen binding fragment of the claimed invention effective to increase the level of said protein activity in said individual.

[0867] Also preferred is a method of treatment of an individual in need of a decreased level of a protein activity, which method comprised administering to such an individual a Therapeutic comprising an amount of an isolated polypeptide, polynucleotide, immunogenic fragment or analogue thereof, binding agent, antibody, or antigen binding fragment of the claimed invention effective to decrease the level of said protein activity in said individual.

[0868] Also preferred is a method of treatment of an individual in need of a specific delivery of toxic compositions to diseased cells (e.g., tumors, leukemias or lymphomas), which method comprises administering to such an individual a Therapeutic comprising an amount of an isolated polypeptide of the invention, including, but not limited to a binding agent, or antibody of the claimed invention that are associated with toxin or cytotoxic prodrugs.

[0869] Having generally described the invention, the same will be more readily understood by reference to the following examples, which are provided by way of illustration and are not intended as limiting.

TABLE 6

| ATCC Deposits | Deposit Date | ATCC Designation Number |
|---|---|---|
| LP01, LP02, | May. 20, 1997 | 209059, 209060, 209061, |
| LP03, LP04, | | 209062, 209063, 209064, |
| LP05, LP06, | | 209065, 209066, 209067, |
| LP07, LP08, | | 209068, 209069 |
| LP09, LP10, | | |
| LP11, | | |
| LP12 | Jan. 12, 1998 | 209579 |
| LP13 | Jan. 12, 1998 | 209578 |
| LP14 | Jul. 16, 1998 | 203067 |
| LP15 | Jul. 16, 1998 | 203068 |
| LP16 | Feb. 1, 1999 | 203609 |
| LP17 | Feb. 1, 1999 | 203610 |
| LP20 | Nov. 17, 1998 | 203485 |
| LP21 | Jun. 18, 1999 | PTA-252 |
| LP22 | Jun. 18, 1999 | PTA-253 |
| LP23 | Dec. 22, 1999 | PTA-1081 |

### EXAMPLES

### Example 1

### Isolation of a Selected cDNA Clone From the Deposited Sample

[0870] Each Clone ID NO:Z is contained in a plasmid vector. Table 7 identifies the vectors used to construct the cDNA library from which each clone was isolated. In many cases, the vector used to construct the library is a phage vector from which a plasmid has been excised. The following correlates the related plasmid for each phage vector used in constructing the cDNA library. For example, where a particular clone is identified in Table 7 as being isolated in the vector “Lambda Zap,” the corresponding deposited clone is in “pBluescript.”

| Vector Used to Construct Library | Corresponding Deposited Plasmid |
|---|---|
| Lambda Zap | pBluescript (pBS) |
| Uni-Zap XR | pBluescript (pBS) |
| Zap Express | pBK |
| lafmid BA | plafmid BA |
| pSport1 | pSport1 |
| pCMVSport 2.0 | pCMVSport 2.0 |
| pCMVSport 3.0 | pCMVSport 3.0 |
| pCR ® 2.1 | pCR ® 2.1 |

[0871] Vectors Lambda Zap (U.S. Pat. Nos. 5,128,256 and 5,286,636), Uni-Zap XR (U.S. Pat. Nos. 5,128, 256 and 5,286,636), Zap Express (U.S. Pat. Nos. 5,128,256 and 5,286,636), pBluescript (pBS) (Short, J. M. et al., Nucleic Acids Res. 16:7583-7600 (1988); Alting-Mees, M. A. and Short, J. M., Nucleic Acids Res. 17:9494 (1989)) and pBK (Alting-Mees, M. A. et al., Strategies 5:58-61 (1992)) are commercially available from Stratagene Cloning Systems, Inc., 11011 N. Torrey Pines Road, La Jolla, Calif., 92037. pBS contains an ampicillin resistance gene and pBK contains a neomycin resistance gene. Both can be transformed into E. coli strain XL-1 Blue, also available from Stratagene. pBS comes in 4 forms SK+, SK−, KS+and KS. The S and K refers to the-orientation of the polylinker to the T7 and T3 primer sequences which flank the polylinker region (“S” is for SacI and “K” is for KpnI which are the first sites on each respective end of the linker). “+” or “−” refer to the orientation of the fl origin of replication (“ori”), such that in one orientation, single stranded rescue initiated from the fl ori generates sense strand DNA and in the other, antisense.

[0872] Vectors pSport1, pCMVSport 2.0 and pCMVSport 3.0, were obtained from Life Technologies, Inc., P. O. Box 6009, Gaithersburg, Md. 20897. All Sport vectors contain an ampicillin resistance gene and may be transformed into E. coli strain DH10B, also available from Life Technologies. (See, for instance, Gruber, C. E., et al., Focus 15:59 (1993)). Vector lafmid BA (Bento Soares, Columbia University, NY) contains an ampicillin resistance gene and can be transformed into E. coli strain XL-l Blue. Vector pCR®2.1, which is available from Invitrogen, 1600 Faraday Avenue, Carlsbad, Calif. 92008, contains an ampicillin resistance gene and may be transformed into E. coli strain DH10B, available from Life Technologies. (See, for instance, Clark, J. M., Nuc. Acids Res. 16:9677-9686 (1988) and Mead, D. et al., Bio/Technology 9: (1991)). Preferably, a polynucleotide of the present invention does not comprise the phage vector sequences identified for the particular clone in Table 7, as well as the corresponding plasmid vector sequences designated above.

[0873] The deposited material in the sample assigned the ATCC Deposit Number cited by reference to Tables 1, 2, 6 and 7 for any given cDNA clone also may contain one or more additional plasmids, each comprising a cDNA clone different from that given clone. Thus, deposits sharing the same ATCC Deposit Number contain at least a plasmid for each Clone ID NO:Z.

TABLE 7

| | | | ATCC |
|---|---|---|---|
| Libraries owned by Catalog | Catalog Description | Vector | Deposit |
| HUKA HUKB HUKC HUKD HUKE | Human Uterine Cancer | Lambda ZAP II | LP01 |
| HUKF HUKG | | | |
| HCNA HCNB | Human Colon | Lambda Zap II | LP01 |
| HFFA | Human Fetal Brain, random primed | Lambda Zap II | LP01 |
| HTWA | Resting T-Cell | Lambda ZAP II | LP01 |
| HBQA | Early Stage Human Brain, random | Lambda ZAP II | LP01 |
| | primed | | |
| HLMB HLMF HLMG HLMH HLMI | breast lymph node CDNA library | Lambda ZAP II | LP01 |
| HLMJ HLMM HLMN | | | |
| HCQA HCQB | human colon cancer | Lamda ZAP II | LP01 |
| HMEA HMEC HMED HMEE HMEF | Human Microvascular Endothelial | Lambda ZAP II | LP01 |
| HMEG HMEI HMEJ HMEK HMEL | Cells, fract. A | | |
| HUSA HUSC | Human Umbilical Vein Endothelial | Lambda ZAP II | LP01 |
| | Cells, fract. A | | |
| HLQA HLQB | Hepatocellular Tumor | Lambda ZAP II | LP01 |
| HHGA HHGB HHGC HHGD | Hemangiopericytoma | Lambda ZAP II | LP01 |
| HSDM | Human Striatum Depression, re-rescue | Lambda ZAP II | LP01 |
| HUSH | H Umbilical Vein Endothelial Cells, | Lambda ZAP II | LP01 |
| | frac A, re-excision | | |
| HSGS | Salivary gland, subtracted | Lambda ZAP II | LP01 |
| HFXA HFXB HFXC HFXD HFXE | Brain frontal cortex | Lambda ZAP II | LP01 |
| HFXF HFXG HFXH | | | |
| HPQA HPQB HPQC | PERM TF274 | Lambda ZAP II | LP01 |
| HFXJ HFXK | Brain Frontal Cortex, re-excision | Lambda ZAP II | LP01 |
| HCWA HCWB HCWC HCWD HCWE | CD34 positive cells (Cord Blood) | ZAP Express | LP02 |
| HCWF HCWG HCWH HCWI HCWJ | | | |
| HCWK | | | |
| HCUA HCUB HCUC | CD34 depleted Buffy Coat (Cord | ZAP Express | LP02 |
| | Blood) | | |
| HRSM | A-14 cell line | ZAP Express | LP02 |
| HRSA | A1-CELL LINE | ZAP Express | LP02 |
| HCUD HCUE HCUF HCUG HCUH | CD34 depleted Buffy Coat (Cord | ZAP Express | LP02 |
| HCUI | Blood), re-excision | | |
| HBXE HBXF HBXG | H. Whole Brain #2, re-excision | ZAP Express | LP02 |
| HRLM | L8 cell line | ZAP Express | LP02 |
| HBXA HBXB HBXC HBXD | Human Whole Brain #2 - Oligo dT > | ZAP Express | LP02 |
| | 1.5 Kb | | |
| HUDA HUDB HUDC | Testes | ZAP Express | LP02 |
| HHTM HHTN HHTO | H. hypothalamus, frac A; re-excision | ZAP Express | LP02 |
| HHTL | H. hypothalamus, frac A | ZAP Express | LP02 |
| HASA HASD | Human Adult Spleen | Uni-ZAP XR | LP03 |
| HFKC HFKD HFKE HFKF HFKG | Human Fetal Kidney | Uni-ZAP XR | LP03 |
| HE8A HE8B HE8C HE8D HE8E HE8F | Human 8 Week Whole Embryo | Uni-ZAP XR | LP03 |
| HE8M HE8N | | | |
| HGBA HGBD HGBE HGBF HGBG | Human Gall Bladder | Uni-ZAP XR | LP03 |
| HGBH HGBI | | | |
| HLHA HLHB HLHC HLHD HLHE | Human Fetal Lung III | Uni-ZAP XR | LP03 |
| HLHF HLHG HLHH HLHQ | | | |
| HPMA HPMB HPMC HPMD HPME | Human Placenta | Uni-ZAP XR | LP03 |
| HPMF HPMG HPMH | | | |
| HPRA HPRB HPRC HPRD | Human Prostate | Uni-ZAP XR | LP03 |
| HSIA HSIC HSID HSIE | Human Adult Small Intestine | Uni-ZAP XR | LP03 |
| HTEA HTEB HTEC HTED HTEE | Human Testes | Uni-ZAP XR | LP03 |
| HTEF HTEG HTEH HTEI HTEJ HTEK | | | |
| HTPA HTPB HTPC HTPD HTPE | Human Pancreas Tumor | Uni-ZAP XR | LP03 |
| HTTA HTTB HTTC HTTD HTTE | Human Testes Tumor | Uni-ZAP XR | LP03 |
| HTTF | | | |
| HAPA HAPB HAPC HAPM | Human Adult Pulmonary | Uni-ZAP XR | LP03 |
| HETA HETB HETC HETD HETE | Human Endometrial Tumor | Uni-ZAP XR | LP03 |
| HETF HETG HETH HETI | | | |
| HHFB HHFC HHFD HHFE HHFF | Human Fetal Heart | Uni-ZAP XR | LP03 |
| HHFG HHFH HHFI | | | |
| HHPB HHPC HHPD HHPE HHPF | Human Hippocampus | Uni-ZAP XR | LP03 |
| HHPG HHPH | | | |
| HCE1 HCE2 HCE3 HCE4 HCE5 HCEB | Human Cerebellum | Uni-ZAP XR | LP03 |
| HCEC HCED HCEE HCEF HCEG | | | |
| HUVB HUVC HUVD HUVE | Human Umbilical Vein, Endo. remake | Uni-ZAP XR | LP03 |
| HSTA HSTB HSTC HSTD | Human Skin Tumor | Uni-ZAP XR | LP03 |
| HTAA HTAB HTAC HTAD HTAE | Human Activated T-Cells | Uni-ZAP XR | LP03 |
| HFEA HFEB HFEC | Human Fetal Epithelium (Skin) | Uni-ZAP XR | LP03 |
| HJPA HJPB HJPC HJPD | HUMAN JURKAT MEMBRANE | Uni-ZAP XR | LP03 |
| | BOUND POLYSOMES | | |
| HESA | Human epithelioid sarcoma | Uni-Zap XR | LP03 |
| HLTA HLTB HLTC HLTD HLTE | Human T-Cell Lymphoma | Uni-ZAP XR | LP03 |
| HLTF | | | |
| HFTA HFTB HFTC HFTD | Human Fetal Dura Mater | Uni-ZAP XR | LP03 |
| HRDA HRDB HRDC HRDD HRDE | Human Rhabdomyosarcoma | Uni-ZAP XR | LP03 |
| HRDF | | | |
| HCAA HCAB HCAC | Cem cells cyclohexamide treated | Uni-ZAP XR | LP03 |
| HRGA HRGB HRGC HRGD | Raji Cells, cyclohexamide treated | Uni-ZAP XR | LP03 |
| HSUA HSUB HSUC HSUM | Supt Cells, cyclohexamide treated | Uni-ZAP XR | LP03 |
| HT4A HT4C HT4D | Activated T-Cells, 12 hrs. | Uni-ZAP XR | LP03 |
| HE9A HE9B HE9C HE9D HE9E HE9F | Nine Week Old Early Stage Human | Uni-ZAP XR | LP03 |
| HE9G HE9H HE9M HE9N | | | |
| HATA HATB HATC HATD HATE | Human Adrenal Gland Tumor | Uni-ZAP XR | LP03 |
| HT5A | Activated T-Cells, 24 hrs. | Uni-ZAP XR | LP03 |
| HFGA HFGM | Human Fetal Brain | Uni-ZAP XR | LP03 |
| HNEA HNEB HNEC HNED HNEE | Human Neutrophil | Uni-ZAP XR | LP03 |
| HBGB HBGD | Human Primary Breast Cancer | Uni-ZAP XR | LP03 |
| HBNA HBNB | Human Normal Breast | Uni-ZAP XR | LP03 |
| HCAS | Cem Cells, cyclohexamide treated, | Uni-ZAP XR | LP03 |
| | subtra | | |
| HHPS | Human Hippocampus, subtracted | pBS | LP03 |
| HKCS HKCU | Human Colon Cancer, subtracted | pBS | LP03 |
| HRGS | Raji cells, cyclohexamide treated, | pBS | LP03 |
| | subtracted | | |
| HSUT | Supt cells, cyclohexamide treated, | pBS | LP03 |
| | differentially expressed | | |
| HT4S | Activated T-Cells, 12 hrs, subtracted | Uni-ZAP XR | LP03 |
| HCDA HCDB HCDC HCDD HCDE | Human Chondrosarcoma | Uni-ZAP XR | LP03 |
| HOAA HOAB HOAC | Human Osteosarcoma | Uni-ZAP XR | LP03 |
| HTLA HTLB HTLC HTLD HTLE | Human adult testis, large inserts | Uni-ZAP XR | LP03 |
| HTLF | | | |
| HLMA HLMC HLMD | Breast Lymph node cDNA library | Uni-ZAP XR | LP03 |
| H6EA H6EB H6EC | HL-60, PMA 4H | Uni-ZAP XR | LP03 |
| HTXA HTXB HTXC HTXD HTXE | Activated T-Cell (12hs)/Thiouridine | Uni-ZAP XR | LP03 |
| HTXF HTXG HTXH | labelledEco | | |
| HNFA HNFB HNFC HNFD HNFE | Human Neutrophil, Activated | Uni-ZAP XR | LP03 |
| HNFF HNFG HNFH HNFJ | | | |
| HTOB HTOC | HUMAN TONSILS, FRACTION 2 | Uni-ZAP XR | LP03 |
| HMGB | Human OB MG63 control fraction I | Uni-ZAP XR | LP03 |
| HOPB | Human OB HOS control fraction I | Uni-ZAP XR | LP03 |
| HORB | Human OB HOS treated (10 nM E2) | Uni-ZAP XR | LP03 |
| | fraction I | | |
| HSVA HSVB HSVC | Human Chronic Synovitis | Uni-ZAP XR | LP03 |
| HROA | HUMAN STOMACH | Uni-ZAP XR | LP03 |
| HBJA HBJB HBJC HBJD HBJE HBJF | HUMAN B CELL LYMPHOMA | Uni-ZAP XR | LP03 |
| HBJG HBJH HBJI HBJJ HBJK | | | |
| HCRA HCRB HCRC | human corpus colosum | Uni-ZAP XR | LP03 |
| HODA HODB HODC HODD | human ovarian cancer | Uni-ZAP XR | LP03 |
| HDSA | Dermatofibrosarcoma Protuberance | Uni-ZAP XR | LP03 |
| HMWA HMWB HMWC HMWD | Bone Marrow Cell Line (RS4; 11) | Uni-ZAP XR | LP03 |
| HMWE HMWF HMWG HMWH | | | |
| HMWI HMWJ | | | |
| HSOA | stomach cancer (human) | Uni-ZAP XR | LP03 |
| HERA | SKIN | Uni-ZAP XR | LP03 |
| HMDA | Brain-medulloblastoma | Uni-ZAP XR | LP03 |
| HGLA HGLB HGLD | Glioblastoma | Uni-ZAP XR | LP03 |
| HEAA | H. Atrophic Endometrium | Uni-ZAP XR | LP03 |
| HBCA HBCB | H. Lymph node breast Cancer | Uni-ZAP XR | LP03 |
| HPWT | Human Prostate BPH, re-excision | Uni-ZAP XR | LP03 |
| HFVG HFVH HFVI | Fetal Liver, subtraction II | pBS | LP03 |
| HNFI | Human Neutrophils, Activated, re- | pBS | LP03 |
| | excision | | |
| HBMB HBMC HBMD | Human Bone Marrow, re-excision | pBS | LP03 |
| HKML HKMM HKMN | H. Kidney Medulla, re-excision | pBS | LP03 |
| HKIX HKIY | H. Kidney Cortex, subtracted | pBS | LP03 |
| HADT | H. Amygdala Depression, subtracted | pBS | LP03 |
| H6AS | Hl-60, untreated, subtracted | Uni-ZAP XR | LP03 |
| H6ES | HL-60, PMA 4H, subtracted | Uni-ZAP XR | LP03 |
| H6BS | HL-60, RA 4 h, Subtracted | Uni-ZAP XR | LP03 |
| H6CS | HL-60, PMA 1 d, subtracted | Uni-ZAP XR | LP03 |
| HTXJ HTXK | Activated T-cell(12 h)/Thiouridine-re- | Uni-ZAP XR | LP03 |
| | excision | | |
| HMSA HMSB HMSC HMSD HMSE | Monocyte activated | Uni-ZAP XR | LP03 |
| HMSF HMSG HMSH HMSI HMSJ | | | |
| HMSK | | | |
| HAGA HAGB HAGC HAGD HAGE | Human Amygdala | Uni-ZAP XR | LP03 |
| HAGF | | | |
| HSRA HSRB HSRE | STROMAL-OSTEOCLASTOMA | Uni-ZAP XR | LP03 |
| HSRD HSRF HSRG HSRH | Human Osteoclastoma Stromal Cells - | Uni-ZAP XR | LP03 |
| | unamplified | | |
| HSQA HSQB HSQC HSQD HSQE | Stromal cell TF274 | Uni-ZAP XR | LP03 |
| HSQF HSQG | | | |
| HSKA HSKB HSKC HSKD HSKE | Smooth muscle, serum treated | Uni-ZAP XR | LP03 |
| HSKF HSKZ | | | |
| HSLA HSLB HSLC HSLD HSLE | Smooth muscle, control | Uni-ZAP XR | LP03 |
| HSLF HSLG | | | |
| HSDA HSDD HSDE HSDF HSDG | Spinal cord | Uni-ZAP XR | LP03 |
| HSDH | | | |
| HPWS | Prostate-BPH subtracted II | pBS | LP03 |
| HSKW HSKX HSKY | Smooth Muscle- HASTE normalized | pBS | LP03 |
| HFPB HFPC HFPD | H. Frontal cortex, epileptic; re-excision | Uni-ZAP XR | LP03 |
| HSDI HSDJ HSDK | Spinal Cord, re-excision | Uni-ZAP XR | LP03 |
| HSKN HSKO | Smooth Muscle Serum Treated, Norm | pBS | LP03 |
| HSKG HSKH HSKI | Smooth muscle, serum induced, re-exc | pBS | LP03 |
| HFCA HFCB HFCC HFCD HFCE | Human Fetal Brain | Uni-ZAP XR | LP04 |
| HFCF | | | |
| HPTA HPTB HPTD | Human Pituitary | Uni-ZAP XR | LP04 |
| HTHB HTHC HTHD | Human Thymus | Uni-ZAP XR | LP04 |
| HE6B HE6C HE6D HE6E HE6F HE6G | Human Whole Six Week Old Embryo | Uni-ZAP XR | LP04 |
| HE6S | | | |
| HSSA HSSB HSSC HSSD HSSE HSSF | Human Synovial Sarcoma | Uni-ZAP XR | LP04 |
| HSSG HSSH HSSI HSSJ HSSK | | | |
| HE7T | 7 Week Old Early Stage Human, | Uni-ZAP XR | LP04 |
| | subtracted | | |
| HEPA HEPB HEPC | Human Epididymus | Uni-ZAP XR | LP04 |
| HSNA HSNB HSNC HSNM HSNN | Human Synovium | Uni-ZAP XR | LP04 |
| HPFB HPFC HPFD HPFE | Human Prostate Cancer, Stage C | Uni-ZAP XR | LP04 |
| | fraction | | |
| HE2A HE2D HE2E HE2H HE2I HE2M | 12 Week Old Early Stage Human | Uni-ZAP XR | LP04 |
| HE2N HE2O | | | |
| HE2B HE2C HE2F HE2G HE2P HE2Q | 12 Week Old Early Stage Human, II | Uni-ZAP XR | LP04 |
| HPTS HPTT HPTU | Human Pituitary, subtracted | Uni-ZAP XR | LP04 |
| HAUA HAUB HAUC | Amniotic Cells - TNF induced | Uni-ZAP XR | LP04 |
| HAQA HAQB HAQC HAQD | Amniotic Cells - Primary Culture | Uni-ZAP XR | LP04 |
| HWTA HWTB HWTC | wilm's tumor | Uni-ZAP XR | LP04 |
| HBSD | Bone Cancer, re-excision | Uni-ZAP XR | LP04 |
| HSGB | Salivary gland, re-excision | Uni-ZAP XR | LP04 |
| HSJA HSJB HSJC | Smooth muscle-ILb induced | Uni-ZAP XR | LP04 |
| HSXA HSXB HSXC HSXD | Human Substantia Nigra | Uni-ZAP XR | LP04 |
| HSHA HSHB HSHC | Smooth muscle, IL1b induced | Uni-ZAP XR | LP04 |
| HOUA HOUB HOUC HOUD HOUE | Adipocytes | Uni-ZAP XR | LP04 |
| HPWA HPWB HPWC HPWD HPWE | Prostate BPH | Uni-ZAP XR | LP04 |
| HELA HELB HELC HELD HELE | Endothelial cells-control | Uni-ZAP XR | LP04 |
| HELF HELG HELH | | | |
| HEMA HEMB HEMC HEMD HEME | Endothelial-induced | Uni-ZAP XR | LP04 |
| HEMF HEMG HEMH | | | |
| HBIA HBIB HBIC | Human Brain, Striatum | Uni-ZAP XR | LP04 |
| HHSA HHSB HHSC HHSD HHSE | Human Hypothalmus, Schizophrenia | Uni-ZAP XR | LP04 |
| HNGA HNGB HNGC HNGD HNGE | neutrophils control | Uni-ZAP XR | LP04 |
| HNGF HNGG HNGH HNGI HNGJ | | | |
| HNHA HNHB HNHC HNHD HNHE | Neutrophils IL-1 and LPS induced | Uni-ZAP XR | LP04 |
| HNHF HNHG HNHH HNHI HNHJ | | | |
| HSDB HSDC | STRIATUM DEPRESSION | Uni-ZAP XR | LP04 |
| HHPT | Hypothalamus | Uni-ZAP XR | LP04 |
| HSAT HSAU HSAV HSAW HSAX | Anergic T-cell | Uni-ZAP XR | LP04 |
| HSAY HSAZ | | | |
| HBMS HBMT HBMU HBMV HBMW | Bone marrow | Uni-ZAP XR | LP04 |
| HBMX | | | |
| HOEA HOEB HOEC HOED HOEE | Osteoblasts | Uni-ZAP XR | LP04 |
| HOEF HOEJ | | | |
| HAIA HAIB HAIC HAID HAIE HAIF | Epithelial-TNFa and INF induced | Uni-ZAP XR | LP04 |
| HTGA HTGB HTGC HTGD | Apoptotic T-cell | Uni-ZAP XR | LP04 |
| HMCA HMCB HMCC HMCD HMCE | Macrophage-oxLDL | Uni-ZAP XR | LP04 |
| HMAA HMAB HMAC HMAD HMAE | Macrophage (GM-CSF treated) | Uni-ZAP XR | LP04 |
| HMAF HMAG | | | |
| HPHA | Normal Prostate | Uni-ZAP XR | LP04 |
| HPIA HPIB HPIC | LNCAP prostate cell line | Uni-ZAP XR | LP04 |
| HPJA HPJB HPJC | PC3 Prostate cell line | Uni-ZAP XR | LP04 |
| HOSE HOSF HOSG | Human Osteoclastoma, re-excision | Uni-ZAP XR | LP04 |
| HTGE HTGF | Apoptotic T-cell, re-excision | Uni-ZAP XR | LP04 |
| HMAJ HMAK | H Macrophage (GM-CSF treated), re- | Uni-ZAP XR | LP04 |
| | excision | | |
| HACB HACC HACD | Human Adipose Tissue, re-excision | Uni-ZAP XR | LP04 |
| HFPA | H. Frontal Cortex, Epileptic | Uni-ZAP XR | LP04 |
| HFAA HFAB HFAC HFAD HFAE | Alzheimers, spongy change | Uni-ZAP XR | LP04 |
| HFAM | Frontal Lobe, Dementia | Uni-ZAP XR | LP04 |
| HMIA HMIB HMIC | Human Manic Depression Tissue | Uni-ZAP XR | LP04 |
| HTSA HTSE HTSF HTSG HTSH | Human Thymus | pBS | LP05 |
| HPBA HPBB HPBC HPBD HPBE | Human Pineal Gland | pBS | LP05 |
| HSAA HSAB HSAC | HSA 172 Cells | pBS | LP05 |
| HSBA HSBB HSBC HSBM | HSC172 cells | pBS | LP05 |
| HJAA HJAB HJAC HJAD | Jurkat T-cell G1 phase | pBS | LP05 |
| HJBA HJBB HJBC HJBD | Jurkat T-Cell, S phase | pBS | LP05 |
| HAFA HAFB | Aorta endothelial cells + TNF-a | pBS | LP05 |
| HAWA HAWB HAWC | Human White Adipose | pBS | LP05 |
| HTNA HTNB | Human Thyroid | pBS | LP05 |
| HONA | Normal Ovary, Premenopausal | pBS | LP05 |
| HARA HARB | Human Adult Retina | pBS | LP05 |
| HLJA HLJB | Human Lung | pCMVSport 1 | LP06 |
| HOFM HOFN HOFO | H. Ovarian Tumor, II, OV5232 | pCMVSport 2.0 | LP07 |
| HOGA HOGB HOGC | OV Oct. 3, 1995 | pCMVSport 2.0 | LP07 |
| HCGL | CD34 + cells, II | pCMVSport 2.0 | LP07 |
| HDLA | Hodgkin's Lymphoma I | pCMVSport 2.0 | LP07 |
| HDTA HDTB HDTC HDTD HDTE | Hodgkin's Lymphoma II | pCMVSport 2.0 | LP07 |
| HKAA HKAB HKAC HKAD HKAE | Keratinocyte | pCMVSport2.0 | LP07 |
| HKAF HKAG HKAH | | | |
| HCIM | CAPFINDER, Crohn's Disease, lib 2 | pCMVSport 2.0 | LP07 |
| HKAL | Keratinocyte, lib 2 | pCMVSport2.0 | LP07 |
| HKAT | Keratinocyte, lib 3 | pCMVSport2.0 | LP07 |
| HNDA | Nasal polyps | pCMVSport2.0 | LP07 |
| HDRA | H. Primary Dendritic Cells, lib 3 | pCMVSport2.0 | LP07 |
| HOHA HOHB HOHC | Human Osteoblasts II | pCMVSport2.0 | LP07 |
| HLDA HLDB HLDC | Liver, Hepatoma | pCMVSport3.0 | LP08 |
| HLDN HLDO HLDP | Human Liver, normal | pCMVSport3.0 | LP08 |
| HMTA | pBMC stimulated w/ poly I/C | pCMVSport3.0 | LP08 |
| HNTA | NTERA2, control | pCMVSport3.0 | LP08 |
| HDPA HDPB HDPC HDPD HDPF | Primary Dendritic Cells, lib 1 | pCMVSport3.0 | LP08 |
| HDPG HDPH HDPI HDPJ HDPK | | | |
| HDPM HDPN HDPO HDPP | Primary Dendritic cells, frac 2 | pCMVSport3.0 | LP08 |
| HMUA HMUB HMUC | Myoloid Progenitor Cell Line | pCMVSport3.0 | LP08 |
| HHEA HHEB HHEC HHED | T Cell helper I | pCMVSport3.0 | LP08 |
| HHEM HHEN HHEO HHEP | T cell helper II | pCMVSport3.0 | LP08 |
| HEQA HEQB HEQC | Human endometrial stromal cells | pCMVSport3.0 | LP08 |
| HJMA HJMB | Human endometrial stromal cells- | pCMVSport3.0 | LP08 |
| | treated with progesterone | | |
| HSWA HSWB HSWC | Human endometrial stromal cells- | pCMVSport3.0 | LP08 |
| | treated with estradiol | | |
| HSYA HSYB HSYC | Human Thymus Stromal Cells | pCMVSport3.0 | LP08 |
| HLWA HLWB HLWC | Human Placenta | pCMVSport3.0 | LP08 |
| HRAA HRAB HRAC | Rejected Kidney, lib 4 | pCMVSport3.0 | LP08 |
| HMTM | PCR, pBMC I/C treated | PCRII | LP09 |
| HMJA | H. Meniingima, M6 | pSport 1 | LP10 |
| HMKA HMKB HMKC HMKD HMKE | H. Meningima, M1 | pSport 1 | LP10 |
| HUSG HUSI | Human umbilical vein endothelial cells, | pSport 1 | LP10 |
| | IL-4 induced | | |
| HUSX HUSY | Human Umbilical Vein Endothelial | pSport 1 | LP10 |
| | Cells, uninduced | | |
| HOFA | Ovarian Tumor I, OV5232 | pSport 1 | LP10 |
| HCFA HCFB HCFC HCFD | T-Cell PHA 16 hrs | pSport 1 | LP10 |
| HCFL HCFM HCFN HCFO | T-Cell PHA 24 hrs | pSport 1 | LP10 |
| HADA HADC HADD HADE HADF | Human Adipose | pSport 1 | LP10 |
| HADG | | | |
| HOVA HOVB HOVC | Human Ovary | pSport 1 | LP10 |
| HTWB HTWC HTWD HTWE HTWF | Resting T-Cell Library, II | pSport 1 | LP10 |
| HMMA | Spleen metastic melanoma | pSport 1 | LP10 |
| HLYA HLYB HLYC HLYD HLYE | Spleen, Chronic lymphocytic leukemia | pSport 1 | LP10 |
| HCGA | CD34 + cell, I | pSport 1 | LP10 |
| HEOM HEON | Human Eosinophils | pSport 1 | LP10 |
| HTDA | Human Tonsil, Lib 3 | pSport 1 | LP10 |
| HSPA | Salivary Gland, Lib 2 | pSport 1 | LP10 |
| HCHA HCHB HCHC | Breast Cancer cell line, MDA 36 | pSport 1 | LP10 |
| HCHM HCHN | Breast Cancer Cell line, angiogenic | pSport 1 | LP10 |
| HCIA | Crohn's Disease | pSport 1 | LP10 |
| HDAA HDAB HDAC | HEL cell line | pSport 1 | LP10 |
| HABA | Human Astrocyte | pSport 1 | LP10 |
| HUFA HUFB HUFC | Ulcerative Colitis | pSport 1 | LP10 |
| HNTM | NTERA2 + retinoic acid, 14 days | pSport 1 | LP10 |
| HDQA | Primary Dendritic cells, CapFinder2, | pSport 1 | LP10 |
| | frac 1 | | |
| HDQM | Primary Dendritic Cells, CapFinder, | pSport 1 | LP10 |
| | frac 2 | | |
| HLDX | Human Liver, | pSport 1 | LP10 |
| | normal, CapFinder | | |
| HULA HULB HULC | Human Dermal Endothelial | pSport1 | LP10 |
| | Cells, untreated | | |
| HUMA | Human Dermal Endothelial cells, treated | pSport1 | LP10 |
| HCJA | Human Stromal Endometrial | pSport1 | LP10 |
| | fibroblasts, untreated | | |
| HCJM | Human Stromal endometrial fibroblasts, | pSport1 | LP10 |
| | treated w/ estradiol | | |
| HEDA | Human Stromal endometrial fibroblasts, | pSport1 | LP10 |
| | treated with progesterone | | |
| HFNA | Human ovary tumor cell OV350721 | pSport1 | LP10 |
| HKGA HKGB HKGC HKGD | Merkel Cells | pSport1 | LP10 |
| HISA HISB HISC | Pancreas Islet Cell Tumor | pSport1 | LP10 |
| HLSA | Skin, burned | pSport1 | LP10 |
| HBZA | Prostate, BPH, Lib 2 | pSport 1 | LP10 |
| HBZS | Prostate BPH, Lib 2, subtracted | pSport 1 | LP10 |
| HFIA HFIB HFIC | Synovial Fibroblasts (control) | pSport 1 | LP10 |
| HFIH HFII HFIJ | Synovial hypoxia | pSport 1 | LP10 |
| HFIT HFIU HFIV | Synovial IL-1/TNF stimulated | pSport 1 | LP10 |
| HGCA | Messangial cell, frac 1 | pSport1 | LP10 |
| HMVA HMVB HMVC | Bone Marrow Stromal Cell, untreated | pSport1 | LP10 |
| HFIX HFIY HFIZ | Synovial Fibroblasts (Il1/TNF), subt | pSport1 | LP10 |
| HFOX HFOY HFOZ | Synovial hypoxia-RSF subtracted | pSport1 | LP10 |
| HMQA HMQB HMQC HMQD | Human Activated Monocytes | Uni-ZAP XR | LP11 |
| HLIA HLIB HLIC | Human Liver | pCMVSport 1 | LP012 |
| HHBA HHBB HHBC HHBD HHBE | Human Heart | pCMVSport 1 | LP012 |
| HBBA HBBB | Human Brain | pCMVSport 1 | LP012 |
| HLJA HLJB HLJC HLJD HLJE | Human Lung | pCMVSport 1 | LP012 |
| HOGA HOGB HOGC | Ovarian Tumor | pCMVSport 2.0 | LP012 |
| HTJM | Human Tonsils, Lib 2 | pCMVSport 2.0 | LP012 |
| HAMF HAMG | KMH2 | pCMVSport 3.0 | LP012 |
| HAJA HAJB HAJC | L428 | pCMVSport 3.0 | LP012 |
| HWBA HWBB HWBC HWBD HWBE | Dendritic cells, pooled | pCMVSport 3.0 | LP012 |
| HWAA HWAB HWAC HWAD HWAE | Human Bone Marrow, treated | pCMVSport 3.0 | LP012 |
| HYAA HYAB HYAC | B Cell lymphoma | pCMVSport 3.0 | LP012 |
| HWHG HWHH HWHI | Healing groin wound, 6.5 hours post | pCMVSport 3.0 | LP012 |
| | incision | | |
| HWHP HWHQ HWHR | Healing groin wound; 7.5 hours post | pCMVSport 3.0 | LP012 |
| | incision | | |
| HARM | Healing groin wound - zero hr post- | pCMVSport 3.0 | LP012 |
| | incision (control) | | |
| HBIM | Olfactory epithelium; nasalcavity | pCMVSport 3.0 | LP012 |
| HWDA | Healing Abdomen wound; 70&90 min | pCMVSport 3.0 | LP012 |
| | post incision | | |
| HWEA | Healing Abdomen Wound; 15 days post | pCMVSport 3.0 | LP012 |
| | incision | | |
| HWJA | Healing Abdomen Wound; 21&29 days | pCMVSport 3.0 | LP012 |
| HNAL | Human Tongue, frac 2 | pSport1 | LP012 |
| HMJA | H. Meniingima, M6 | pSport1 | LP012 |
| HMKA HMKB HMKC HMKD HMKE | H. Meningima, M1 | pSport1 | LP012 |
| HOFA | Ovarian Tumor I, OV5232 | pSport1 | LP012 |
| HCFA HCFB HCFC HCFD | T-Cell PHA 16 hrs | pSport1 | LP012 |
| HCFL HCFM HCFN HCFO | T-Cell PHA 24 hrs | pSport1 | LP012 |
| HMMA HMMB HMMC | Spleen metastic melanoma | pSport1 | LP012 |
| HTDA | Human Tonsil, Lib 3 | pSport1 | LP012 |
| HDBA | Human Fetal Thymus | pSport1 | LP012 |
| HDUA | Pericardium | pSport1 | LP012 |
| HBZA | Prostate, BPH, Lib 2 | pSport1 | LP012 |
| HWCA | Larynx tumor | pSport1 | LP012 |
| HWKA | Normal lung | pSport1 | LP012 |
| HSMB | Bone marrow stroma, treated | pSport1 | LP012 |
| HBHM | Normal trachea | pSport1 | LP012 |
| HLFC | Human Larynx | pSport1 | LP012 |
| HLRB | Siebben Polyposis | pSport1 | LP012 |
| HNIA | Mammary Gland | pSport1 | LP012 |
| HNJB | Palate carcinoma | pSport1 | LP012 |
| HNKA | Palate normal | pSport1 | LP012 |
| HMZA | Pharynx carcinoma | pSport1 | LP012 |
| HABG | Cheek Carcinoma | pSport1 | LP012 |
| HMZM | Pharynx Carcinoma | pSport1 | LP012 |
| HDRM | Larynx Carcinoma | pSport1 | LP012 |
| HVAA | Pancreas normal PCA4 No | pSport1 | LP012 |
| HICA | Tongue carcinoma | pSport1 | LP012 |
| HUKA HUKB HUKC HUKD HUKE | Human Uterine Cancer | Lambda ZAP II | LP013 |
| HFFA | Human Fetal Brain, random primed | Lambda ZAP II | LP013 |
| HTUA | Activated T-cell labeled with 4-thioluri | Lambda ZAP II | LP013 |
| HBQA | Early Stage Human Brain, random | Lambda ZAP II | LP013 |
| | primed | | |
| HMEB | Human microvascular Endothelial cells, | Lambda ZAP II | LP013 |
| | fract. B | | |
| HUSH | Human Umbilical Vein Endothelial | Lambda ZAP II | LP013 |
| | cells, fract. A, re-excision | | |
| HLQC HLQD | Hepatocellular tumor, re-excision | Lambda ZAP II | LP013 |
| HTWJ HTWK HTWL | Resting T-cell, re-excision | Lambda ZAP II | LP013 |
| HF6S | Human Whole 6 week Old Embryo (II), | pBluescript | LP013 |
| | subt | | |
| HHPS | Human Hippocampus, subtracted | pBluescript | LP013 |
| HLIS | LNCAP, differential expression | pBluescript | LP013 |
| HLHS HLHT | Early Stage Human Lung, Subtracted | pBluescript | LP013 |
| HSUS | Supt cells, cyclohexamide treated, | pBluescript | LP013 |
| | subtracted | | |
| HSUT | Supt cells, cyclohexamide treated, | pBluescript | LP013 |
| | differentially expressed | | |
| HSDS | H Striatum Depression, subtracted | pBluescript | LP013 |
| HPTZ | Human Pituitary, Subtracted VII | pBluescript | LP013 |
| HSDX | H. Striatum Depression, subt II | pBluescript | LP013 |
| HSDZ | H. Striatum Depression, subt | pBluescript | LP013 |
| HPBA HPBB HPBC HPBD HPBE | Human Pineal Gland | pBluescript SK- | LP013 |
| HRTA | Colorectal Tumor | pBluescript SK- | LP013 |
| HSBA HSBB HSBC HSBM | HSC172 cells | pBluescript SK- | LP013 |
| HJAA HJAB HJAC HJAD | Jurkat T-cell G1 phase | pBluescript SK- | LP013 |
| HJBA HJBB HJBC HJBD | Jurkat T-cell, S1 phase | pBluescript SK- | LP013 |
| HTNA HTNB | Human Thyroid | pBluescript SK- | LP013 |
| HAHA HAHB | Human Adult Heart | Uni-ZAP XR | LP013 |
| HE6A | Whole 6 week Old Embryo | Uni-ZAP XR | LP013 |
| HFCA HFCB HFCC HFCD HFCE | Human Fetal Brain | Uni-ZAP XR | LP013 |
| HFKC HFKD HFKE HFKF HFKG | Human Fetal Kidney | Uni-ZAP XR | LP013 |
| HGBA HGBD HGBE HGBF HGBG | Human Gall Bladder | Uni-ZAP XR | LP013 |
| HPRA HPRB HPRC HPRD | Human Prostate | Uni-ZAP XR | LP013 |
| HTEA HTEB HTEC HTED HTEE | Human Testes | Uni-ZAP XR | LP013 |
| HTTA HTTB HTTC HTTD HTTE | Human Testes Tumor | Uni-ZAP XR | LP013 |
| HYBA HYBB | Human Fetal Bone | Uni-ZAP XR | LP013 |
| HFLA | Human Fetal Liver | Uni-ZAP XR | LP013 |
| HHFB HHFC HHFD HHFE HHFF | Human Fetal Heart | Uni-ZAP XR | LP013 |
| HUVB HUVC HUVD HUVE | Human Umbilical Vein, End. remake | Uni-ZAP XR | LP013 |
| HTHB HTHC HTHD | Human Thymus | Uni-ZAP XR | LP013 |
| HSTA HSTB HSTC HSTD | Human Skin Tumor | Uni-ZAP XR | LP013 |
| HTAA HTAB HTAC HTAD HTAE | Human Activated T-cells | Uni-ZAP XR | LP013 |
| HFEA HFEB HFEC | Human Fetal Epithelium (skin) | Uni-ZAP XR | LP013 |
| HJPA HJPB HJPC HJPD | Human Jurkat Membrane Bound | Uni-ZAP XR | LP013 |
| | Polysomes | | |
| HESA | Human Epithelioid Sarcoma | Uni-ZAP XR | LP013 |
| HALS | Human Adult Liver, Subtracted | Uni-ZAP XR | LP013 |
| HFTA HFTB HFTC HFTD | Human Fetal Dura Mater | Uni-ZAP XR | LP013 |
| HCAA HCAB HCAC | Cem cells, cyclohexamide treated | Uni-ZAP XR | LP013 |
| HRGA HRGB HRGC HRGD | Raji Cells, cyclohexamide treated | Uni-ZAP XR | LP013 |
| HE9A HE9B HE9C HE9D HE9E | Nine Week Old Early Stage Human | Uni-ZAP XR | LP013 |
| HSFA | Human Fibrosarcoma | Uni-ZAP XR | LP013 |
| HATA HATB HATC HATD HATE | Human Adrenal Gland Tumor | Uni-ZAP XR | LP013 |
| HTRA | Human Trachea Tumor | Uni-ZAP XR | LP013 |
| HE2A HE2D HE2E HE2H HE2I | 12 Week Old Early Stage Human | Uni-ZAP XR | LP013 |
| HE2B HE2C HE2F HE2G HE2P | 12 Week Old Early Stage Human, II | Uni-ZAP XR | LP013 |
| HNEA HNEB HNEC HNED HNEE | Human Neutrophil | Uni-ZAP XR | LP013 |
| HBGA | Human Primary Breast Cancer | Uni-ZAP XR | LP013 |
| HPTS HPTT HPTU | Human Pituitary, subtracted | Uni-ZAP XR | LP013 |
| HMQA HMQB HMQC HMQD | Human Activated Monocytes | Uni-ZAP XR | LP013 |
| HOAA HOAB HOAC | Human Osteosarcoma | Uni-ZAP XR | LP013 |
| HTOA HTOD HTOE HTOF HTOG | human tonsils | Uni-ZAP XR | LP013 |
| HMGB | Human OB MG63 control fraction I | Uni-ZAP XR | LP013 |
| HOPB | Human OB HOS control fraction I | Uni-ZAP XR | LP013 |
| HOQB | Human OB HOS treated (1 nM E2) | Uni-ZAP XR | LP013 |
| | fraction I | | |
| HAUA HAUB HAUC | Amniotic Cells - TNF induced | Uni-ZAP XR | LP013 |
| HAQA HAQB HAQC HAQD | Amniotic Cells - Primary Culture | Uni-ZAP XR | LP013 |
| HROA HROC | HUMAN STOMACH | Uni-ZAP XR | LP013 |
| HBJA HBJB HBJC HBJD HBJE | HUMAN B CELL LYMPHOMA | Uni-ZAP XR | LP013 |
| HODA HODB HODC HODD | human ovarian cancer | Uni-ZAP XR | LP013 |
| HCPA | Corpus Callosum | Uni-ZAP XR | LP013 |
| HSOA | stomach cancer (human) | Uni-ZAP XR | LP013 |
| HERA | SKIN | Uni-ZAP XR | LP013 |
| HMDA | Brain-medulloblastoma | Uni-ZAP XR | LP013 |
| HGLA HGLB HGLD | Glioblastoma | Uni-ZAP XR | LP013 |
| HWTA HWTB HWTC | wilm's tumor | Uni-ZAP XR | LP013 |
| HEAA | H. Atrophic Endometrium | Uni-ZAP XR | LP013 |
| HAPN HAPO HAPP HAPQ HAPR | Human Adult Pulmonary; re-excision | Uni-ZAP XR | LP013 |
| HLTG HLTH | Human T-cell lymphoma; re-excision | Uni-ZAP XR | LP013 |
| HAHC HAHD HAHE | Human Adult Heart; re-excision | Uni-ZAP XR | LP013 |
| HAGA HAGB HAGC HAGD HAGE | Human Amygdala | Uni-ZAP XR | LP013 |
| HSJA HSJB HSJC | Smooth muscle-ILb induced | Uni-ZAP XR | LP013 |
| HSHA HSHB HSHC | Smooth muscle, IL1b induced | Uni-ZAP XR | LP013 |
| HPWA HPWB HPWC HPWD HPWE | Prostate BPH | Uni-ZAP XR | LP013 |
| HPIA HPIB HPIC | LNCAP prostate cell line | Uni-ZAP XR | LP013 |
| HPJA HPJB HPJC | PC3 Prostate cell line | Uni-ZAP XR | LP013 |
| HBTA | Bone Marrow Stroma, TNF&LPS ind | Uni-ZAP XR | LP013 |
| HMCF HMCG HMCH HMCI HMCJ | Macrophage-oxLDL; re-excision | Uni-ZAP XR | LP013 |
| HAGG HAGH HAGI | Human Amygdala; re-excision | Uni-ZAP XR | LP013 |
| HACA | H. Adipose Tissue | Uni-ZAP XR | LP013 |
| HKFB | K562 + PMA (36 hrs), re-excision | ZAP Express | LP013 |
| HCWT HCWU HCWV | CD34 positive cells (cord blood), re-ex | ZAP Express | LP013 |
| HBWA | Whole brain | ZAP Express | LP013 |
| HBXA HBXB HBXC HBXD | Human Whole Brain #2 - Oligo dT > | ZAP Express | LP013 |
| | 1.5 Kb | | |
| HAVM | Temporal cortex-Alzheizmer | pT-Adv | LP014 |
| HAVT | Hippocampus, Alzheimer Subtracted | pT-Adv | LP014 |
| HHAS | CHME Cell Line | Uni-ZAP XR | LP014 |
| HAJR | Larynx normal | pSport 1 | LP014 |
| HWLE HWLF HWLG HWLH | Colon Normal | pSport 1 | LP014 |
| HCRM HCRN HCRO | Colon Carcinoma | pSport 1 | LP014 |
| HWLI HWLJ HWLK | Colon Normal | pSport 1 | LP014 |
| HWLQ HWLR HWLS HWLT | Colon Tumor | pSport 1 | LP014 |
| HBFM | Gastrocnemius Muscle | pSport 1 | LP014 |
| HBOD HBOE | Quadriceps Muscle | pSport 1 | LP014 |
| HBKD HBKE | Soleus Muscle | pSport 1 | LP014 |
| HCCM | Pancreatic Langerhans | pSport 1 | LP014 |
| HWGA | Larynx carcinoma | pSport 1 | LP014 |
| HWGM HWGN | Larynx carcinoma | pSport 1 | LP014 |
| HWLA HWLB HWLC | Normal colon | pSport 1 | LP014 |
| HWLM HWLN | Colon Tumor | pSport 1 | LP014 |
| HVAM HVAN HVAO | Pancreas Tumor | pSport 1 | LP014 |
| HWGQ | Larynx carcinoma | pSport 1 | LP014 |
| HAQM HAQN | Salivary Gland | pSport 1 | LP014 |
| HASM | Stomach; normal | pSport 1 | LP014 |
| HBCM | Uterus; normal | pSport 1 | LP014 |
| HCDM | Testis; normal | pSport 1 | LP014 |
| HDJM | Brain; normal | pSport 1 | LP014 |
| HEFM | Adrenal Gland, normal | pSport 1 | LP014 |
| HBAA | Rectum normal | pSport 1 | LP014 |
| HFDM | Rectum tumour | pSport 1 | LP014 |
| HGAM | Colon, normal | pSport 1 | LP014 |
| HHMM | Colon, tumour | pSport 1 | LP014 |
| HCLB HCLC | Human Lung Cancer | Lambda Zap II | LP015 |
| HRLA | L1 Cell line | ZAP Express | LP015 |
| HHAM | Hypothalamus, Alzheimer's | pCMVSport 3.0 | LP015 |
| HKBA | Ku 812F Basophils Line | pSport 1 | LP015 |
| HS2S | Saos2, Dexamethosome Treated | pSport 1 | LP016 |
| HA5A | Lung Carcinoma A549 TNFalpha | pSport 1 | LP016 |
| | activated | | |
| HTFM | TF-1 Cell Line GM-CSF Treated | pSport 1 | LP016 |
| HYAS | Thyroid Tumour | pSport 1 | LP016 |
| HUTS | Larynx Normal | pSport 1 | LP016 |
| HXOA | Larynx Tumor | pSport 1 | LP016 |
| HEAH | Ea.hy.926 cell line | pSport 1 | LP016 |
| HINA | Adenocarcinoma Human | pSport 1 | LP016 |
| HRMA | Lung Mesothelium | pSport 1 | LP016 |
| HLCL | Human Pre-Differentiated Adipocytes | Uni-Zap XR | LP017 |
| HS2A | Saos2 Cells | pSport 1 | LP020 |
| HS2I | Saos2 Cells; Vitamin D3 Treated | pSport 1 | LP020 |
| HUCM | CHME Cell Line, untreated | pSport 1 | LP020 |
| HEPN | Aryepiglottis Normal | pSport 1 | LP020 |
| HPSN | Sinus Piniformis Tumour | pSport 1 | LP020 |
| HNSA | Stomach Normal | pSport 1 | LP020 |
| HNSM | Stomach Tumour | pSport 1 | LP020 |
| HNLA | Liver Normal Met5No | pSport 1 | LP020 |
| HUTA | Liver Tumour Met 5 Tu | pSport 1 | LP020 |
| HOCN | Colon Normal | pSport 1 | LP020 |
| HOCT | Colon Tumor | pSport 1 | LP020 |
| HTNT | Tongue Tumour | pSport 1 | LP020 |
| HLXN | Larynx Normal | pSport 1 | LP020 |
| HLXT | Larynx Tumour | pSport 1 | LP020 |
| HTYN | Thymus | pSport 1 | LP020 |
| HPLN | Placenta | pSport 1 | LP020 |
| HTNG | Tongue Normal | pSport 1 | LP020 |
| HZAA | Thyroid Normal (SDCA2 No) | pSport 1 | LP020 |
| HWES | Thyroid Thyroiditis | pSport 1 | LP020 |
| HFHD | Ficolled Human Stromal Cells, 5Fu | pTrip1Ex2 | LP021 |
| | treated | | |
| HFHM, HFHN | Ficolled Human Stromal Cells, | pTrip1Ex2 | LP021 |
| | Untreated | | |
| HPCI | Hep G2 Cells, lambda library | lambda Zap-CMV XR | LP021 |
| HBCA, HBCB, HBCC | H. Lymph node breast Cancer | Uni-ZAP XR | LP021 |
| HCOK | Chondrocytes | pSPORT1 | LP022 |
| HDCA, HDCB, HDCC | Dendritic Cells From CD34 Cells | pSPORT1 | LP022 |
| HDMA, HDMB | CD40 activated monocyte dendritic | pSPORT1 | LP022 |
| | cells | | |
| HDDM, HDDN, HDDO | LPS activated derived dendritic cells | pSPORT1 | LP022 |
| HPCR | Hep G2 Cells, PCR library | lambda Zap-CMV XR | LP022 |
| HAAA, HAAB, HAAC | Lung, Cancer (4005313A3): Invasive | pSPORT1 | LP022 |
| | Poorly Differentiated Lung | | |
| | Adenocarcinoma | | |
| HIPA, HIPB, HIPC | Lung, Cancer (4005163 B7): Invasive, | pSPORT1 | LP022 |
| | Poorly Diff. Adenocarcinoma, | | |
| | Metastatic | | |
| HOOH, HOOI | Ovary, Cancer: (4004562 B6) Papillary | pSPORT1 | LP022 |
| | Serous Cystic Neoplasm, Low | | |
| | Malignant Pot | | |
| HIDA | Lung, Normal: (4005313 B1) | pSPORT1 | LP022 |
| HUJA, HUJB, HUJC, HUJD, HUJE | B-Cells | pCMVSport 3.0 | LP022 |
| HNOA, HNOB, HNOC, HNOD | Ovary, Normal: (9805C040R) | pSPORT1 | LP022 |
| HNLM | Lung, Normal: (4005313 B1) | pSPORT1 | LP022 |
| HSCL | Stromal Cells | pSPORT1 | LP022 |
| HAAX | Lung, Cancer: (4005313 A3) Invasive | pSPORT1 | LP022 |
| | Poorly-differentiated Metastatic lung | | |
| | adenocarcinoma | | |
| HUUA, HUUB, HUUC, HUUD | B-cells (unstimulated) | pTrip1Ex2 | LP022 |
| HWWA, HWWB, HWWC, HWWD, HWWE, | B-cells (stimulated) | pSPORT1 | LP022 |
| HWWF, HWWG | | | |
| HCCC | Colon, Cancer: (9808C064R) | pCMVSport 3.0 | LP023 |
| HPDO HPDP HPDQ HPDR HPD | Ovary, Cancer (9809C332): Poorly | pSport 1 | LP023 |
| | differentiated adenocarcinoma | | |
| HPCO HPCP HPCQ HPCT | Ovary, Cancer (15395A1F): Grade II | pSport 1 | LP023 |
| | Papillary Carcinoma | | |
| HOCM HOCO HOCP HOCQ | Ovary, Cancer: (15799A1F) Poorly | pSport 1 | LP023 |
| | differentiated carcinoma | | |
| HCBM HCBN HCBO | Breast, Cancer: (4004943 A5) | pSport 1 | LP023 |
| HNBT HNBU HNBV | Breast, Normal: (4005522B2) | pSport 1 | LP023 |
| HBCP HBCQ | Breast, Cancer: (4005522 A2) | pSport 1 | LP023 |
| HBCJ | Breast, Cancer: (9806C012R) | pSport 1 | LP023 |
| HSAM HSAN | Stromal cells 3.88 | pSport 1 | LP023 |
| HVCA HVCB HVCC HVCD | Ovary, Cancer: (4004332 A2) | pSport 1 | LP023 |
| HSCK HSEN HSEO | Stromal cells (HBM3.18) | pSport 1 | LP023 |
| HSCP HSCQ | stromal cell clone 2.5 | pSport 1 | LP023 |
| HUXA | Breast Cancer: (4005385 A2) | pSport 1 | LP023 |
| HCOM HCON HCOO HCOP HCOQ | Ovary, Cancer (4004650 A3): Well- | pSport 1 | LP023 |
| | Differentiated Micropapillary Serous | | |
| | Carcinoma | | |
| HBNM | Breast, Cancer: (9802C020E) | pSport 1 | LP023 |
| HVVA HVVB HVVC HVVD HVVE | Human Bone Marrow, treated | pSport 1 | LP023 |

[0874] Two nonlimiting examples are provided below for isolating a particular clone from the deposited sample of plasmid cDNAs cited for that clone in Table 7. First, a plasmid is directly isolated by screening the clones using a polynucleotide probe corresponding to the nucleotide sequence of SEQ ID NO:X.

[0875] Particularly, a specific polynucleotide with 30-40 nucleotides is synthesized using an Applied Biosystems DNA synthesizer according to the sequence reported. The oligonucleotide is labeled, for instance, with ³²P-γ-ATP using T4 polynucleotide kinase and purified according to routine methods. (E.g., Maniatis et al., Molecular Cloning: A Laboratory Manual, Cold Spring Harbor Press, Cold Spring, N.Y. (1982)). The plasmid mixture is transformed into a suitable host, as indicated above (such as XL-1 Blue (Stratagene)) using techniques known to those of skill in the art, such as those provided by the vector supplier or in related publications or patents cited above. The transformants are plated on 1.5% agar plates (containing the appropriate selection agent, e.g., ampicillin) to a density of about 150 transformants (colonies) per plate. These plates are screened using Nylon membranes according to routine methods for bacterial colony screening (e.g., Sambrook et al., Molecular Cloning: A Laboratory Manual, 2nd Edit., (1989), Cold Spring Harbor Laboratory Press, pages 1.93 to 1.104), or other techniques known to those of skill in the art.

[0876] Alternatively, two primers of 17-20 nucleotides derived from both ends of the nucleotide sequence of SEQ ID NO:X are synthesized and used to amplify the desired cDNA using the deposited cDNA plasmid as a template. The polymerase chain reaction is carried out under routine conditions, for instance, in 25 μl of reaction mixture with 0.5 μg of the above cDNA template. A convenient reaction mixture is 1.5-5 mM MgCl₂, 0.01% (w/v) gelatin, 20 μM each of dATP, dCTP, dGTP, dTTP, 25 pmol of each primer and 0.25 Unit of Taq polymerase. Thirty five cycles of PCR (denaturation at 94° C. for 1 min; annealing at 55° C. for 1 min; elongation at 72° C. for 1 min) are performed with a Perkin-Elmer Cetus automated thermal cycler. The amplified product is analyzed by agarose gel electrophoresis and the DNA band with expected molecular weight is excised and purified. The PCR product is verified to be the selected sequence by subcloning and sequencing the DNA product.

[0877] Several methods are available for the identification of the 5′ or 3′ non-coding portions of a gene which may not be present in the deposited clone. These methods include but are not limited to, filter probing, clone enrichment using specific probes, and protocols similar or identical to 5′ and 3′ “RACE” protocols which are well known in the art. For instance, a method similar to 5′ RACE is available for generating the missing 5′ end of a desired full-length transcript. (Fromont-Racine et al., Nucleic Acids Res. 21(7):1683-1684 (1993)).

[0878] Briefly, a specific RNA oligonucleotide is ligated to the 5′ ends of a population of RNA presumably containing full-length gene RNA transcripts. A primer set containing a primer specific to the ligated RNA oligonucleotide and a primer specific to a known sequence of the gene of interest is used to PCR amplify the 5′ portion of the desired full-length gene. This amplified product may then be sequenced and used to generate the full length gene.

[0879] This above method starts with total RNA isolated from the desired source, although poly-A+RNA can be used. The RNA preparation can then be treated with phosphatase if necessary to eliminate 5′ phosphate groups on degraded or damaged RNA which may interfere with the later RNA ligase step. The phosphatase should then be inactivated and the RNA treated with tobacco acid pyrophosphatase in order to remove the cap structure present at the 5′ ends of messenger RNAs. This reaction leaves a 5′ phosphate group at the 5′ end of the cap cleaved RNA which can then be ligated to an RNA oligonucleotide using T4 RNA ligase.

[0880] This modified RNA preparation is used as a template for first strand cDNA synthesis using a gene specific oligonucleotide. The first strand synthesis reaction is used as a template for PCR amplification of the desired 5′ end using a primer specific to the ligated RNA oligonucleotide and a primer specific to the known sequence of the gene of interest. The resultant product is then sequenced and analyzed to confirm that the 5′ end sequence belongs to the desired gene.

### Example 2

### Isolation of Genomic Clones Corresponding to a Polynucleotide

[0881] A human genomic P1 library (Genomic Systems, Inc.) is screened by PCR using primers selected for the sequence corresponding to SEQ ID NO:X according to the method described in Example 1. (See also, Sambrook.)

### Example 3

### Tissue Specific Expression Analysis

[0882] The Human Genome Sciences, Inc. (HGS) database is derived from sequencing tissue and/or disease specific cDNA libraries. Libraries generated from a particular tissue are selected and the specific tissue expression pattern of EST groups or assembled contigs within these libraries is determined by comparison of the expression patterns of those groups or contigs within the entire database. ESTs and assembled contigs which show tissue specific expression are selected.

[0883] The original clone from which the specific EST sequence was generated, or in the case of an assembled contig, the clone from which the 5′ most EST sequence was generated, is obtained from the catalogued library of clones and the insert amplified by PCR using methods known in the art. The PCR product is denatured and then transferred in 96 or 384 well format to a nylon membrane (Schleicher and Scheull) generating an array filter of tissue specific clones. Housekeeping genes, maize genes, and known tissue specific genes are included on the filters. These targets can be used in signal normalization and to validate assay sensitivity. Additional targets are included to monitor probe length and specificity of hybridization.

[0884] Radioactively labeled hybridization probes are generated by first strand cDNA synthesis per the manufacturer's instructions (Life Technologies) from mRNA/RNA samples prepared from the specific tissue being analyzed (e.g., prostate, prostate cancer, ovarian, ovarian cancer, etc.). The hybridization probes are purified by gel exclusion chromatography, quantitated, and hybridized with the array filters in hybridization bottles at 65° C. overnight. The filters are washed under stringent conditions and signals are captured using a Fuji phosphorimager.

[0885] Data is extracted using AIS software and following background subtraction, signal normalization is performed. This includes a normalization of filter-wide expression levels between different experimental runs. Genes that are differentially expressed in the tissue of interest are identified.

### Example 4

### Chromosomal Mapping of the Polynucleotides

[0886] An oligonucleotide primer set is designed according to the sequence at the 5′ end of SEQ ID NO:X. This primer preferably spans about 100 nucleotides. This primer set is then used in a polymerase chain reaction under the following set of conditions: 30 seconds, 95° C.; 1 minute, 56° C.; 1 minute, 70° C. This cycle is repeated 32 times followed by one 5 minute cycle at 70° C. Human, mouse, and hamster DNA is used as template in addition to a somatic cell hybrid panel containing individual chromosomes or chromosome fragments (Bios, Inc). The reactions are analyzed on either 8% polyacrylamide gels or 3.5% agarose gels. Chromosome mapping is determined by the presence of an approximately 100 bp PCR fragment in the particular somatic cell hybrid.

### Example 5

### Bacterial Expression of a Polypeptide

[0887] A polynucleotide encoding a polypeptide of the present invention is amplified using PCR oligonucleotide primers corresponding to the 5′ and 3′ ends of the DNA sequence, as outlined in Example 1, to synthesize insertion fragments. The primers used to amplify the cDNA insert should preferably contain restriction sites, such as BamHI and XbaI, at the 5′ end of the primers in order to clone the amplified product into the expression vector. For example, BamHI and XbaI correspond to the restriction enzyme sites on the bacterial expression vector pQE-9. (Qiagen, Inc., Chatsworth, Calif.). This plasmid vector encodes antibiotic resistance (Ampr), a bacterial origin of replication (ori), an IPTG-regulatable promoter/operator (P/O), a ribosome binding site (RBS), a 6-histidine tag (6-His), and restriction enzyme cloning sites.

[0888] The pQE-9 vector is digested with BamHI and XbaI and the amplified fragment is ligated into the pQE-9 vector maintaining the reading frame initiated at the bacterial RBS. The ligation mixture is then used to transform the E. coli strain M15/rep4 (Qiagen, Inc.) which contains multiple copies of the plasmid pREP4, which expresses the lacI repressor and also confers kanamycin resistance (Kanr). Transformants are identified by their ability to grow on LB plates and ampicillin/kanamycin resistant colonies are selected. Plasmid DNA is isolated and confirmed by restriction analysis.

[0889] Clones containing the desired constructs are grown overnight (O/N) in liquid culture in LB media supplemented with both Amp (100 ug/ml) and Kan (25 ug/ml). The OIN culture is used to inoculate a large culture at a ratio of 1:100 to 1:250. The cells are grown to an optical density 600 (O.D.⁶⁰⁰) of between 0.4 and 0.6. IPTG (Isopropyl-B-D-thiogalacto pyranoside) is then added to a final concentration of 1 mM. IPTG induces by inactivating the lacI repressor, clearing the P/O leading to increased gene expression.

[0890] Cells are grown for an extra 3 to 4 hours. Cells are then harvested by centrifugation (20 mins at 6000× g). The cell pellet is solubilized in the chaotropic agent 6 Molar Guanidine HCl by stirring for 3-4 hours at 4° C. The cell debris is removed by centrifugation, and the supernatant containing the polypeptide is loaded onto a nickel-nitrilo-tri-acetic acid (“Ni-NTA”) affinity resin column (available from QIAGEN, Inc., supra). Proteins with a 6×His tag bind to the Ni-NTA resin with high affinity and can be purified in a simple one-step procedure (for details see: The QlAexpressionist (1995) QIAGEN, Inc., supra).

[0891] Briefly, the supernatant is loaded onto the column in 6 M guanidine-HCl, pH 8. The column is first washed with 10 volumes of 6 M guanidine-HCl, pH 8, then washed with 10 volumes of 6 M guanidine-HCl pH 6, and finally the polypeptide is eluted with 6 M guanidine-HCl, pH 5.

[0892] The purified protein is then renatured by dialyzing it against phosphate-buffered saline (PBS) or 50 mM Na-acetate, pH 6 buffer plus 200 mM NaCl. Alternatively, the protein can be successfully refolded while immobilized on the Ni-NTA column. The recommended conditions are as follows: renature using a linear 6M-1M urea gradient in 500 mM NaCl, 20% glycerol, 20 mM Tris/HCl pH 7.4, containing protease inhibitors. The renaturation should be performed over a period of 1.5 hours or more. After renaturation the proteins are eluted by the addition of 250 mM immidazole. Immidazole is removed by a final dialyzing step against PBS or 50 mM sodium acetate pH 6 buffer plus 200 mM NaCl. The purified protein is stored at 4° C. or frozen at −80° C.

[0893] In addition to the above expression vector, the present invention further includes an expression vector, called pHE4a (ATCC Accession Number 209645, deposited on Feb. 25, 1998) which contains phage operator and promoter elements operatively linked to a polynucleotide of the present invention, called pHE4a. (ATCC Accession Number 209645, deposited on Feb. 25, 1998.) This vector contains: 1) a neomycinphosphotransferase gene as a selection marker, 2) an E. coli origin of replication, 3) a T5 phage promoter sequence, 4) two lac operator sequences, 5) a Shine-Delgamo sequence, and 6) the lactose operon repressor gene (lacIq). The origin of replication (oriC) is derived from pUC19 (LTI, Gaithersburg, Md.). The promoter and operator sequences are made synthetically.

[0894] DNA can be inserted into the pHE4a by restricting the vector with NdeI and XbaI, BamHI, XhoI, or Asp718, running the restricted product on a gel, and isolating the larger fragment (the stuffer fragment should be about 310 base pairs). The DNA insert is generated according to the PCR protocol described in Example 1, using PCR primers having restriction sites for NdeI (5′ primer) and XbaI, BamHI, XhoI, or Asp718 (3′ primer). The PCR insert is gel purified and restricted with compatible enzymes. The insert and vector are ligated according to standard protocols.

[0895] The engineered vector could easily be substituted in the above protocol to express protein in a bacterial system.

### Example 6

### Purification of a Polypeptide from an Inclusion Body

[0896] The following alternative method can be used to purify a polypeptide expressed in E coli when it is present in the form of inclusion bodies. Unless otherwise specified, all of the following steps are conducted at 4-10° C.

[0897] Upon completion of the production phase of the E. coli fermentation, the cell culture is cooled to 4-10° C. and the cells harvested by continuous centrifugation at 15,000 rpm (Heraeus Sepatech). On the basis of the expected yield of protein per unit weight of cell paste and the amount of purified protein required, an appropriate amount of cell paste, by weight, is suspended in a buffer solution containing 100 mM Tris, 50 mM EDTA, pH 7.4. The cells are dispersed to a homogeneous suspension using a high shear mixer.

[0898] The cells are then lysed by passing the solution through a microfluidizer (Microfuidics, Corp. or APV Gaulin, Inc.) twice at 4000-6000 psi. The homogenate is then mixed with NaCl solution to a final concentration of 0.5 M NaCl, followed by centrifugation at 7000× g for 15 min. The resultant pellet is washed again using 0.5M NaCl, 100 mM Tris, 50 mM EDTA, pH 7.4.

[0899] The resulting washed inclusion bodies are solubilized with 1.5 M guanidine hydrochloride (GuHCl) for 2-4 hours. After 7000× g centrifugation for 15 min., the pellet is discarded and the polypeptide containing supernatant is incubated at 4° C. overnight to allow further GuHCl extraction.

[0900] Following high speed centrifugation (30,000× g) to remove insoluble particles, the GuHCl solubilized protein is refolded by quickly mixing the GuHCl extract with 20 volumes of buffer containing 50 mM sodium, pH 4.5, 150 mM NaCl, 2 mM EDTA by vigorous stirring. The refolded diluted protein solution is kept at 4° C. without mixing for 12 hours prior to further purification steps.

[0901] To clarify the refolded polypeptide solution, a previously prepared tangential filtration unit equipped with 0.16 μm membrane filter with appropriate surface area (e.g., Filtron), equilibrated with 40 mM sodium acetate, pH 6.0 is employed. The filtered sample is loaded onto a cation exchange resin (e.g., Poros HS-50, Perseptive Biosystems). The column is washed with 40 mM sodium acetate, pH 6.0 and eluted with 250 mM, 500 mM, 1000 mM, and 1500 mM NaCl in the same buffer, in a stepwise manner. The absorbance at 280 nm of the effluent is continuously monitored. Fractions are collected and further analyzed by SDS-PAGE.

[0902] Fractions containing the polypeptide are then pooled and mixed with 4 volumes of water. The diluted sample is then loaded onto a previously prepared set of tandem columns of strong anion (Poros HQ-50, Perseptive Biosystems) and weak anion (Poros CM-20, Perseptive Biosystems) exchange resins. The columns are equilibrated with 40 mM sodium acetate, pH 6.0. Both columns are washed with 40 mM sodium acetate, pH 6.0, 200 mM NaCl. The CM-20 column is then eluted using a 10 column volume linear gradient ranging from 0.2 M NaCl, 50 mM sodium acetate, pH 6.0 to 1.0 M NaCl, 50 mM sodium acetate, pH 6.5. Fractions are collected under constant A₂₈₀ monitoring of the effluent. Fractions containing the polypeptide (determined, for instance, by 16% SDS-PAGE) are then pooled.

[0903] The resultant polypeptide should exhibit greater than 95% purity after the above refolding and purification steps. No major contaminant bands should be observed from Commassie blue stained 16% SDS-PAGE gel when 5 μg of purified protein is loaded. The purified protein can also be tested for endotoxin/LPS contamination, and typically the LPS content is less than 0.1 ng/ml according to LAL assays.

### Example 7

### Cloning and Expression of a Polypeptide in a Baculovirus Expression System

[0904] In this example, the plasmid shuttle vector pA2 is used to insert a polynucleotide into a baculovirus to express a polypeptide. This expression vector contains the strong polyhedrin promoter of the Autographa califormica nuclear polyhedrosis virus (AcMNPV) followed by convenient restriction sites such as BamHI, Xba I and Asp718. The polyadenylation site of the simian virus 40 (“SV40”) is used for efficient polyadenylation. For easy selection of recombinant virus, the plasmid contains the beta-galactosidase gene from E. coli under control of a weak Drosophila promoter in the same orientation, followed by the polyadenylation signal of the polyhedrin gene. The inserted genes are flanked on both sides by viral sequences for cell-mediated homologous recombination with wild-type viral DNA to generate a viable virus that express the cloned polynucleotide.

[0905] Many other baculovirus vectors can be used in place of the vector above, such as pAc373, pVL941, and pAcIM1, as one skilled in the art would readily appreciate, as long as the construct provides appropriately located signals for transcription, translation, secretion and the like, including a signal peptide and an in-frame AUG as required. Such vectors are described, for instance, in Luckow et al., Virology 170:31-39 (1989).

[0906] Specifically, the cDNA sequence contained in the deposited clone, including the AUG initiation codon, is amplified using the PCR protocol described in Example 1. If a naturally occurring signal sequence is used to produce the polypeptide of the present invention, the pA2 vector does not need a second signal peptide. Alternatively, the vector can be modified (pA2 GP) to include a baculovirus leader sequence, using the standard methods described in Summers et al., “A Manual of Methods for Baculovirus Vectors and Insect Cell Culture Procedures,” Texas Agricultural Experimental Station Bulletin No. 1555 (1987).

[0907] The amplified fragment is isolated from a 1% agarose gel using a commercially available kit (“Geneclean,” BIO 101 Inc., La Jolla, Calif.). The fragment then is digested with appropriate restriction enzymes and again purified on a 1% agarose gel.

[0908] The plasmid is digested with the corresponding restriction enzymes and optionally, can be dephosphorylated using calf intestinal phosphatase, using routine procedures known in the art. The DNA is then isolated from a 1% agarose gel using a commercially available kit (“Geneclean” BIO 101 Inc., La Jolla, Calif.).

[0909] The fragment and the dephosphorylated plasmid are ligated together with T4 DNA ligase. E. coli HB 101 or other suitable E. coli hosts such as XL-1 Blue (Stratagene Cloning Systems, La Jolla, Calif.) cells are transformed with the ligation mixture and spread on culture plates. Bacteria containing the plasmid are identified by digesting DNA from individual colonies and analyzing the digestion product by gel electrophoresis. The sequence of the cloned fragment is confirmed by DNA sequencing.

[0910] Five μg of a plasmid containing the polynucleotide is co-transfected with 1.0 μg of a commercially available linearized baculovirus DNA (“BaculoGold” baculovirus DNA, Pharmingen, San Diego, Calif.), using the lipofection method described by Felgner et al., Proc. Natl. Acad. Sci. USA 84:7413-7417 (1987). One μg of BaculoGold™ virus DNA and 5 μg of the plasmid are mixed in a sterile well of a microtiter plate containing 50 μl of serum-free Grace's medium (Life Technologies Inc., Gaithersburg, Md.). Afterwards, 10 μl Lipofectin plus 90 μl Grace's medium are added, mixed and incubated for 15 minutes at room temperature. Then the transfection mixture is added drop-wise to Sf9 insect cells (ATCC CRL 1711) seeded in a 35 mm tissue culture plate with 1 ml Grace's medium without serum. The plate is then incubated for 5 hours at 27° C. The transfection solution is then removed from the plate and 1 ml of Grace's insect medium supplemented with 10% fetal calf serum is added. Cultivation is then continued at 27° C. for four days.

[0911] After four days the supernatant is collected and a plaque assay is performed, as described by Summers and Smith, supra. An agarose gel with “Blue Gal” (Life Technologies Inc., Gaithersburg) is used to allow easy identification and isolation of gal-expressing clones, which produce blue-stained plaques. (A detailed description of a “plaque assay” of this type can also be found in the user's guide for insect cell culture and baculovirology distributed by Life Technologies Inc., Gaithersburg, page 9-10.) After appropriate incubation, blue stained plaques are picked with the tip of a micropipettor (e.g., Eppendorf). The agar containing the recombinant viruses is then resuspended in a microcentrifuge tube containing 200 μl of Grace's medium and the suspension containing the recombinant baculovirus is used to infect Sf9 cells seeded in 35 mm dishes. Four days later the supernatants of these culture dishes are harvested and then they are stored at 4° C.

[0912] To verify the expression of the polypeptide, Sf9 cells are grown in Grace's medium supplemented with 10% heat-inactivated FBS. The cells are infected with the recombinant baculovirus containing the polynucleotide at a multiplicity of infection (“MOI”) of about 2. If radiolabeled proteins are desired, 6 hours later the medium is removed and is replaced with SF900 II medium minus methionine and cysteine (available from Life Technologies Inc., Rockville, Md.). After 42 hours, 5 μCi of ³⁵S-methionine and 5 μCi ³⁵S-cysteine (available from Amersham) are added. The cells are further incubated for 16 hours and then are harvested by centrifugation. The proteins in the supernatant as well as the intracellular proteins are analyzed by SDS-PAGE followed by autoradiography (if radiolabeled).

[0913] Microsequencing of the amino acid sequence of the amino terminus of purified protein may be used to determine the amino terminal sequence of the produced protein.

### Example 8

### Expression of a Polypeptide in Mammalian Cells

[0914] The polypeptide of the present invention can be expressed in a mammalian cell. A typical mammalian expression vector contains a promoter element, which mediates the initiation of transcription of mRNA, a protein coding sequence, and signals required for the termination of transcription and polyadenylation of the transcript. Additional elements include enhancers, Kozak sequences and intervening sequences flanked by donor and acceptor sites for RNA splicing. Highly efficient transcription is achieved with the early and late promoters from SV40, the long terminal repeats (LTRs) from Retroviruses, e.g., RSV, HTLVI, HIVI and the early promoter of the cytomegalovirus (CMV). However, cellular elements can also be used (e.g., the human actin promoter).

[0915] Suitable expression vectors for use in practicing the present invention include, for example, vectors such as pSVL and pMSG (Pharmacia, Uppsala, Sweden), pRSVcat (ATCC 37152), pSV2dhfr (ATCC 37146), pBC12MI (ATCC 67109), pCMVSport 2.0, and pCMVSport 3.0. Mammalian host cells that could be used include, human Hela, 293, H9 and Jurkat cells, mouse NIH3T3 and C127 cells, Cos 1, Cos 7 and CV1, quail QC1-3 cells, mouse L cells and Chinese hamster ovary (CHO) cells.

[0916] Alternatively, the polypeptide can be expressed in stable cell lines containing the polynucleotide integrated into a chromosome. The co-transfection with a selectable marker such as DHFR, gpt, neomycin, or hygromycin allows the identification and isolation of the transfected cells.

[0917] The transfected gene can also be amplified to express large amounts of the encoded protein. The DHFR (dihydrofolate reductase) marker is useful in developing cell lines that carry several hundred or even several thousand copies of the gene of interest. (See, e.g., Alt, F. W., et al., J. Biol. Chem. 253:1357-1370 (1978); Hamlin, J. L. and Ma, C., Biochem. et Biophys. Acta, 1097:107-143 (1990); Page, M. J. and Sydenham, M. A., Biotechnology 9:64-68 (1991)). Another useful selection marker is the enzyme glutamine synthase (GS) (Murphy et al., Biochem J. 227:277-279 (1991); Bebbington et al., Bio/Technology 10:169-175 (1992). Using these markers, the mammalian cells are grown in selective medium and the cells with the highest resistance are selected. These cell lines contain the amplified gene(s) integrated into a chromosome. Chinese hamster ovary (CHO) and NSO cells are often used for the production of proteins.

[0918] Derivatives of the plasmid pSV2-dhfr (ATCC Accession No. 37146), the expression vectors pC4 (ATCC Accession No. 209646) and pC6 (ATCC Accession No.209647) contain the strong promoter (LTR) of the Rous Sarcoma Virus (Cullen et al., Molecular and Cellular Biology, 438-447 (March, 1985)) plus a fragment of the CMV-enhancer (Boshart et al., Cell 41:521-530 (1985)). Multiple cloning sites, e.g., with the restriction enzyme cleavage sites BamHI, XbaI and Asp718, facilitate the cloning of the gene of interest. The vectors also contain the 3′ intron, the polyadenylation and termination signal of the rat preproinsulin gene, and the mouse DHFR gene under control of the SV40 early promoter.

[0919] Specifically, the plasmid pC6, for example, is digested with appropriate restriction enzymes and then dephosphorylated using calf intestinal phosphates by procedures known in the art. The vector is then isolated from a 1% agarose gel.

[0920] A polynucleotide of the present invention is amplified according to the protocol outlined in Example 1. If a naturally occurring signal sequence is used to produce the polypeptide of the present invention, the vector does not need a second signal peptide. Alternatively, if a naturally occurring signal sequence is not used, the vector can be modified to include a heterologous signal sequence. (See, e.g., International Publication No. WO 96/34891.)

[0921] The amplified fragment is isolated from a 1% agarose gel using a commercially available kit (“Geneclean,” BIO 101 Inc., La Jolla, Calif.). The fragment then is digested with appropriate restriction enzymes and again purified on a 1% agarose gel.

[0922] The amplified fragment is then digested with the same restriction enzyme and purified on a 1% agarose gel. The isolated fragment and the dephosphorylated vector are then ligated with T4 DNA ligase. E. coli HB101 or XL-1 Blue cells are then transformed and bacteria are identified that contain the fragment inserted into plasmid pC6 using, for instance, restriction enzyme analysis.

[0923] Chinese hamster ovary cells lacking an active DHFR gene is used for transfection. Five μg of the expression plasmid pC6 or pC4 is cotransfected with 0.5 μg of the plasmid pSVneo using lipofectin (Felgner et al., supra). The plasmid pSV2-neo contains a dominant selectable marker, the neo gene from Tn5 encoding an enzyme that confers resistance to a group of antibiotics including G418. The cells are seeded in alpha minus MEM supplemented with 1 mg/ml G418. After 2 days, the cells are trypsinized and seeded in hybridoma cloning plates (Greiner, Germany) in alpha minus MEM supplemented with 10, 25, or 50 ng/ml of methotrexate plus 1 mg/ml G418. After about 10-14 days single clones are trypsinized and then seeded in 6-well petri dishes or 10 ml flasks using different concentrations of methotrexate (50 nM, 100 nM, 200 nM, 400 nM, 800 nM). Clones growing at the highest concentrations of methotrexate are then transferred to new 6-well plates containing even higher concentrations of methotrexate (1 μM, 2 μM, 5 μM, 10 mM, 20 mM). The same procedure is repeated until clones are obtained which grow at a concentration of 100-200 μM. Expression of the desired gene product is analyzed, for instance, by SDS-PAGE and Western blot or by reversed phase HPLC analysis.

### Example 9

### Protein Fusions

[0924] The polypeptides of the present invention are preferably fused to other proteins. These fusion proteins can be used for a variety of applications. For example, fusion of the present polypeptides to His-tag, HA-tag, protein A, IgG domains, and maltose binding protein facilitates purification. (See Example 5; see also EP A 394,827; Traunecker, et al., Nature 331:84-86 (1988)). Similarly, fusion to IgG-1, IgG-3, and albumin increases the halflife time in vivo. Nuclear localization signals fused to the polypeptides of the present invention can target the protein to a specific subcellular localization, while covalent heterodimer or homodimers can increase or decrease the activity of a fusion protein. Fusion proteins can also create chimeric molecules having more than one function. Finally, fusion proteins can increase solubility and/or stability of the fused protein compared to the non-fused protein. All of the types of fusion proteins described above can be made by modifying the following protocol, which outlines the fusion of a polypeptide to an IgG molecule, or the protocol described in Example 5.

[0925] Briefly, the human Fc portion of the IgG molecule can be PCR amplified, using primers that span the 5′ and 3′ ends of the sequence described below. These primers also should have convenient restriction enzyme sites that will facilitate cloning into an expression vector, preferably a mammalian expression vector.

[0926] For example, if pC4 (ATCC Accession No. 209646) is used, the human Fc portion can be ligated into the BamHI cloning site. Note that the 3′ BamHI site should be destroyed. Next, the vector containing the human Fc portion is re-restricted with BamHI, linearizing the vector, and a polynucleotide of the present invention, isolated by the PCR protocol described in Example 1, is ligated into this BamHI site. Note that the polynucleotide is cloned without a stop codon, otherwise a fusion protein will not be produced.

[0927] If the naturally occurring signal sequence is used to produce the polypeptide of the present invention, pC4 does not need a second signal peptide. Alternatively, if the naturally occurring signal sequence is not used, the vector can be modified to include a heterologous signal sequence. (See, e.g., International Publication No. WO 96/34891.)

Human IgG Fc region:

| | |
|---|---|
| GGGATCCGGAGCCCAAATCTTCTGACAAAACTCACAC | (SEQ ID NO:1) |
| ATGCCCACCGTGCCCAGCACCTGAATTCGAGGGTGCA | |
| CCGTCAGTCTTCCTCTTCCCCCCAAAACCCAAGGACA | |
| CCCTCATGATCTCCCGGACTCCTGAGGTCACATGCGT | |
| GGTGGTGGACGTAAGCCACGAAGACCCTGAGGTCAAG | |
| TTCAACTGGTACGTGGACGGCGTGGAGGTGCATAATG | |
| CCAAGACAAAGCCGCGGGAGGAGCAGTACAACAGCAC | |
| GTACCGTGTGGTCAGCGTCCTCACCGTCCTGCACCAG | |
| GACTGGCTGAATGGCAAGGAGTACAAGTGCAAGGTCT | |
| CCAACAAAGCCCTCCCAACCCCCATCGAGAAAACCAT | |
| CTCCAAAGCCAAAGGGCAGCCCCGAGAACCACAGGTG | |
| TACACCCTGCCCCCATCCCGGGATGAGCTGACCAAGA | |
| ACCAGGTCAGCCTGACCTGCCTGGTCAAAGGCTTCTA | |
| TCCAAGCGACATCGCCGTGGAGTGGGAGAGCAATGGG | |
| CAGCCGGAGAACAACTACAAGACCACGCCTCCCGTGC | |
| TGGACTCCGACGGCTCCTTCTTCCTCTACAGCAAGCT | |
| CACCGTGGACAAGAGCAGGTGGCAGCAGGGGAACGTC | |
| TTCTCATGCTCCGTGATGCATGAGGCTCTGCACAACC | |
| ACTACACGCAGAAGAGCCTCTCCCTGTCTCCGGGTAA | |
| ATGAGTGCGACGGCCGCGACTCTAGAGGAT | |

### Example 10

### Production of an Antibodyfrom a Polypeptide

[0928] a) Hybridoma Technology

[0929] The antibodies of the present invention can be prepared by a variety of methods. (See, Current Protocols, Chapter 2.) As one example of such methods, cells expressing a polypeptide of the present invention are administered to an animal to induce the production of sera containing polyclonal antibodies. In a preferred method, a preparation of a a polypeptide of the present invention is prepared and purified to render it substantially free of natural contaminants. Such a preparation is then introduced into an animal in order to produce polyclonal antisera of greater specific activity.

[0930] Monoclonal antibodies specific for a polypeptide of the present invention are prepared using hybridoma technology (Kohler et al., Nature 256:495 (1975); Kohler et al., Eur. J. Immunol. 6:511 (1976); Kohler et al., Eur. J. Immunol. 6:292 (1976); Hammerling et al., in: Monoclonal Antibodies and T-Cell Hybridomas, Elsevier, N.Y., pp. 563-681 (1981)). In general, an animal (preferably a mouse) is immunized with a polypeptide of the present invention or, more preferably, with a secreted polypeptide of the present invention-expressing cell. Such polypeptide-expressing cells are cultured in any suitable tissue culture medium, preferably in Earle's modified Eagle's medium supplemented with 10% fetal bovine serum (inactivated at about 56° C.), and supplemented with about 10 g/l of nonessential amino acids, about 1,000 U/ml of penicillin, and about 100 μg/ml of streptomycin.

[0931] The splenocytes of such mice are extracted and fused with a suitable myeloma cell line. Any suitable myeloma cell line may be employed in accordance with the present invention; however, it is preferable to employ the parent myeloma cell line (SP20), available from the ATCC. After fusion, the resulting hybridoma cells are selectively maintained in HAT medium, and then cloned by limiting dilution as described by Wands et al. (Gastroenterology 80:225-232 (1981)). The hybridoma cells obtained through such a selection are then assayed to identify clones which secrete antibodies capable of binding the polypeptide of the present invention.

[0932] Alternatively, additional antibodies capable of binding to polypeptide of the present invention can be produced in a two-step procedure using anti-idiotypic antibodies. Such a method makes use of the fact that antibodies are themselves antigens, and therefore, it is possible to obtain an antibody which binds to a second antibody. In accordance with this method, protein specific antibodies are used to immunize an animal, preferably a mouse. The splenocytes of such an animal are then used to produce hybridoma cells, and the hybridoma cells are screened to identify clones which produce an antibody whose ability to bind to the polypeptide of the present invention-specific antibody can be blocked by polypeptide of the present invention. Such antibodies comprise anti-idiotypic antibodies to the polypeptide of the present invention-specific antibody and are used to immunize an animal to induce formation of further polypeptide of the present invention-specific antibodies.

[0933] For in vivo use of antibodies in humans, an antibody is “humanized”. Such antibodies can be produced using genetic constructs derived from hybridoma cells producing the monoclonal antibodies described above. Methods for producing chimeric and humanized antibodies are known in the art and are discussed herein. (See, for review, Morrison, Science 229:1202 (1985); Oi et al., BioTechniques 4:214 (1986); Cabilly et al., U.S. Pat. No. 4,816,567; Taniguchi et al., EP 171496; Morrison et al., EP 173494; Neuberger et al., WO 8601533; Robinson et al., International Publication No. WO 8702671; Boulianne et al., Nature 312:643 (1984); Neuberger et al., Nature 314:268 (1985)).

[0934] b) Isolation Of Antibody Fragments Directed Against Polypeptide of the Present Invention From A Library Of scFvs

[0935] Naturally occurring V-genes isolated from human PBLs are constructed into a library of antibody fragments which contain reactivities against polypeptide of the present invention to which the donor may or may not have been exposed (see e.g., U.S. Pat. No. 5,885,793 incorporated herein by reference in its entirety).

[0936] Rescue of the Library. A library of scFvs is constructed from the RNA of human PBLs as described in International Publication No. WO 92/01047. To rescue phage displaying antibody fragments, approximately 10⁹ E. coli harboring the phagemid are used to inoculate 50 ml of 2×TY containing 1% glucose and 100 μg/ml of ampicillin (2×TY-AMP-GLU) and grown to an O.D. of 0.8 with shaking. Five ml of this culture is used to inoculate 50 ml of 2×TY-AMP-GLU, 2×108 TU of delta gene 3 helper (M13 delta gene III, see International Publication No. WO 92/01047) are added and the culture incubated at 37° C. for 45 minutes without shaking and then at 37° C. for 45 minutes with shaking. The culture is centrifuged at 4000 r.p.m. for 10 min. and the pellet resuspended in 2 liters of 2×TY containing 100 μg/ml ampicillin and 50 ug/ml kanamycin and grown overnight. Phage are prepared as described in International Publication No. WO 92/01047.

[0937] M13 delta gene III is prepared as follows: M13 delta gene III helper phage does not encode gene III protein, hence the phage(mid) displaying antibody fragments have a greater avidity of binding to antigen. Infectious M13 delta gene III particles are made by growing the helper phage in cells harboring a pUC19 derivative supplying the wild type gene III protein during phage morphogenesis. The culture is incubated for 1 hour at 37° C. without shaking and then for a further hour at 37° C. with shaking. Cells are spun down (IEC-Centra 8,400 r.p.m. for 10 min), resuspended in 300 ml 2×TY broth containing 100 μg ampicillin/ml and 25 μg kanamycin/ml (2×TY-AMP-KAN) and grown overnight, shaking at 37° C. Phage particles are purified and concentrated from the culture medium by two PEG-precipitations (Sambrook et al., 1990), resuspended in 2 ml PBS and passed through a 0.45 μm filter (Minisart NML; Sartorius) to give a final concentration of approximately 10¹³ transducing units/ml (ampicillin-resistant clones).

[0938] Panning of the Library.

[0939] Immunotubes (Nunc) are coated overnight in PBS with 4 ml of either 100 μg/ml or 10 μg/ml of a polypeptide of the present invention. Tubes are blocked with 2% Marvel-PBS for 2 hours at 37° C. and then washed 3 times in PBS. Approximately 10¹³ TU of phage is applied to the tube and incubated for 30 minutes at room temperature tumbling on an over and under turntable and then left to stand for another 1.5 hours. Tubes are washed 10 times with PBS 0.1% Tween-20 and 10 times with PBS. Phage are eluted by adding 1 ml of 100 mM triethylamine and rotating 15 minutes on an under and over turntable after which the solution is immediately neutralized with 0.5 ml of 1.0M Tris-HCl, pH 7.4. Phage are then used to infect 10 ml of mid-log E. coli TG1 by incubating eluted phage with bacteria for 30 minutes at 37° C. The E. coli are then plated on TYE plates containing 1% glucose and 100 μg/ml ampicillin. The resulting bacterial library is then rescued with delta gene 3 helper phage as described above to prepare phage for a subsequent round of selection. This process is then repeated for a total of 4 rounds of affinity purification with tube-washing increased to 20 times with PBS, 0.1% Tween-20 and 20 times with PBS for rounds 3 and 4.

[0940] Characterization of Binders. Eluted phage from the 3rd and 4th rounds of selection are used to infect E. coli HB 2151 and soluble scFv is produced (Marks, et al., 1991) from single colonies for assay. ELISAs are performed with microtitre plates coated with either 10 pg/ml of the polypeptide of the present invention in 50 mM bicarbonate pH 9.6. Clones positive in ELISA are further characterized by PCR fingerprinting (see, e.g., International Publication No. WO 92/01047) and then by sequencing. These ELISA positive clones may also be further characterized by techniques known in the art, such as, for example, epitope mapping, binding affinity, receptor signal transduction, ability to block or competitively inhibit antibody/antigen binding, and competitive agonistic or antagonistic activity.

### Example 11

### Method of Determining Alterations in a Gene Corresponding to a Polynucleotide

[0941] RNA isolated from entire families or individual patients presenting with a phenotype of interest (such as a disease) is isolated. cDNA is then generated from these RNA samples using protocols known in the art. (See, Sambrook.) The cDNA is then used as a template for PCR, employing primers surrounding regions of interest in SEQ ID NO:X; and/or the nucleotide sequence of the cDNA contained in Clone ID NO:Z. Suggested PCR conditions consist of 35 cycles at 95 degrees C for 30 seconds; 60-120 seconds at 52-58 degrees C; and 60-120 seconds at 70 degrees C, using buffer solutions described in Sidransky et al., Science 252:706 (1991).

[0942] PCR products are then sequenced using primers labeled at their 5′ end with T4 polynucleotide kinase, employing SequiTherm Polymerase (Epicentre Technologies). The intron-exon boundaries of selected exons is also determined and genomic PCR products analyzed to confirm the results. PCR products harboring suspected mutations are then cloned and sequenced to validate the results of the direct sequencing.

[0943] PCR products are cloned into T-tailed vectors as described in Holton et al., Nucleic Acids Research, 19:1156 (1991) and sequenced with T7 polymerase (United States Biochemical). Affected individuals are identified by mutations not present in unaffected individuals.

[0944] Genomic rearrangements are also observed as a method of determining alterations in a gene corresponding to a polynucleotide. Genomic clones isolated according to Example 2 are nick-translated with digoxigenindeoxy-uridine 5′-triphosphate (Boehringer Manheim), and FISH performed as described in Johnson et al., Methods Cell Biol. 35:73-99 (1991). Hybridization with the labeled probe is carried out using a vast excess of human cot-i DNA for specific hybridization to the corresponding genomic locus.

[0945] Chromosomes are counterstained with 4,6-diamino-2-phenylidole and propidium iodide, producing a combination of C- and R-bands. Aligned images for precise mapping are obtained using a triple-band filter set (Chroma Technology, Brattleboro, Vt.) in combination with a cooled charge-coupled device camera (Photometrics, Tucson, Ariz.) and variable excitation wavelength filters. (Johnson et al., Genet. Anal. Tech. Appl., 8:75 (1991)). Image collection, analysis and chromosomal fractional length measurements are performed using the ISee Graphical Program System. (Inovision Corporation, Durham, N.C.) Chromosome alterations of the genomic region hybridized by the probe are identified as insertions, deletions, and translocations. These alterations are used as a diagnostic marker for an associated disease.

### Example 12

### Method of Detecting Abnormal Levels of a Polypeptide in a Biological Sample

[0946] A polypeptide of the present invention can be detected in a biological sample, and if an increased or decreased level of the polypeptide is detected, this polypeptide is a marker for a particular phenotype. Methods of detection are numerous, and thus, it is understood that one skilled in the art can modify the following assay to fit their particular needs.

[0947] For example, antibody-sandwich ELISAs are used to detect polypeptides in a sample, preferably a biological sample. Wells of a microtiter plate are coated with specific antibodies, at a final concentration of 0.2 to 10 ug/ml. The antibodies are either monoclonal or polyclonal and are produced by the method described in Example 10. The wells are blocked so that non-specific binding of the polypeptide to the well is reduced.

[0948] The coated wells are then incubated for >2 hours at RT with a sample containing the polypeptide. Preferably, serial dilutions of the sample should be used to validate results. The plates are then washed three times with deionized or distilled water to remove unbound polypeptide.

[0949] Next, 50 ul of specific antibody-alkaline phosphatase conjugate, at a concentration of 25400 ng, is added and incubated for 2 hours at room temperature. The plates are again washed three times with deionized or distilled water to remove unbound conjugate.

[0950] Add 75 ul of 4-methylumbelliferyl phosphate (MUP) or p-nitrophenyl phosphate (NPP) substrate solution to each well and incubate 1 hour at room temperature. Measure the reaction by a microtiter plate reader. Prepare a standard curve, using serial dilutions of a control sample, and plot polypeptide concentration on the X-axis (log scale) and fluorescence or absorbance of the Y-axis (linear scale). Interpolate the concentration of the polypeptide in the sample using the standard curve.

### Example 13

### Formulation

[0951] The invention also provides methods of treatment and/or prevention of diseases or disorders (such as, for example, any one or more of the diseases or disorders disclosed herein) by administration to a subject of an effective amount of a Therapeutic. By therapeutic is meant polynucleotides or polypeptides of the invention (including fragments and variants), agonists or antagonists thereof, and/or antibodies thereto, in combination with a pharmaceutically acceptable carrier type (e.g., a sterile carrier).

[0952] The Therapeutic will be formulated and dosed in a fashion consistent with good medical practice, taking into account the clinical condition of the individual patient (especially the side effects of treatment with the Therapeutic alone), the site of delivery, the method of administration, the scheduling of administration, and other factors known to practitioners. The “effective amount” for purposes herein is thus determined by such considerations.

[0953] As a general proposition, the total pharmaceutically effective amount of the Therapeutic administered parenterally per dose will be in the range of about 1 ug/kg/day to 10 mg/kg/day of patient body weight, although, as noted above, this will be subject to therapeutic discretion. More preferably, this dose is at least 0.01 mg/kg/day, and most preferably for humans between about 0.01 and 1 mg/kg/day for the hormone. If given continuously, the Therapeutic is typically administered at a dose rate of about 1 ug/kg/hour to about 50 ug/kg/hour, either by 1-4 injections per day or by continuous subcutaneous infusions, for example, using a mini-pump. An intravenous bag solution may also be employed. The length of treatment needed to observe changes and the interval following treatment for responses to occur appears to vary depending on the desired effect.

[0954] Therapeutics can be are administered orally, rectally, parenterally, intracistemally, intravaginally, intraperitoneally, topically (as by powders, ointments, gels, drops or transdermal patch), bucally, or as an oral or nasal spray. “Pharmaceutically acceptable carrier” refers to a non-toxic solid, semisolid or liquid filler, diluent, encapsulating material or formulation auxiliary of any. The term “parenteral” as used herein refers to modes of administration which include intravenous, intramuscular, intraperitoneal, intrastemal, subcutaneous and intraarticular injection and infusion.

[0955] Therapeutics of the invention are also suitably administered by sustained-release systems. Suitable examples of sustained-release Therapeutics are administered orally, rectally, parenterally, intracistemally, intravaginally, intraperitoneally, topically (as by powders, ointments, gels, drops or transdermal patch), bucally, or as an oral or nasal spray. “Pharmaceutically acceptable carrier” refers to a non-toxic solid, semisolid or liquid filler, diluent, encapsulating material or formulation auxiliary of any type. The term “parenteral” as used herein refers to modes of administration which include intravenous, intramuscular, intraperitoneal, intrastemal, subcutaneous and intraarticular injection and infusion.

[0956] Therapeutics of the invention are also suitably administered by sustained-release systems. Suitable examples of sustained-release Therapeutics include suitable polymeric materials (such as, for example, semi-permeable polymer matrices in the form of shaped articles, e.g., films, or mirocapsules), suitable hydrophobic materials (for example as an emulsion in an acceptable oil) or ion exchange resins, and sparingly soluble derivatives (such as, for example, a sparingly soluble salt).

[0957] Sustained-release matrices include polylactides (U.S. Pat. No. 3,773,919, EP 58,481), copolymers of L-glutamic acid and gamma-ethyl-L-glutamate (Sidman et al., Biopolymers 22:547-556 (1983)), poly (2-hydroxyethyl methacrylate) (Langer et al., J. Biomed. Mater. Res. 15:167-277 (1981), and Langer, Chem. Tech. 12:98-105 (1982)), ethylene vinyl acetate (Langer et al., Id.) or poly-D- (-)-3-hydroxybutyric acid (EP 133,988).

[0958] Sustained-release Therapeutics also include liposomally entrapped Therapeutics of the invention (see generally, Langer, Science 249:1527-1533 (1990); Treat et al., in Liposomes in the Therapy of Infectious Disease and Cancer, Lopez-Berestein and Fidler (eds.), Liss, New York, pp. 317-327 and 353-365 (1989)). Liposomes containing the Therapeutic are prepared by methods known per se: DE 3,218,121; Epstein et al., Proc. Natl. Acad. Sci. (USA) 82:3688-3692 (1985); Hwang et al., Proc. Natl. Acad. Sci.(USA) 77:4030-4034 (1980); EP 52,322; EP 36,676; EP 88,046; EP 143,949; EP 142,641; Japanese Pat. Appl. 83-118008; U.S. Pat. Nos. 4,485,045 and 4,544,545; and EP 102,324. Ordinarily, the liposomes are of the small (about 200-800 Angstroms) unilamellar type in which the lipid content is greater than about 30 mol. percent cholesterol, the selected proportion being adjusted for the optimal Therapeutic.

[0959] In yet an additional embodiment, the Therapeutics of the invention are delivered by way of a pump (see Langer, supra; Sefton, CRC Crit. Ref. Biomed. Eng. 14:201 (1987); Buchwald et al., Surgery 88:507 (1980); Saudek et al., N. Engl. J. Med. 321:574 (1989)).

[0960] Other controlled release systems are discussed in the review by Langer (Science 249:1527-1533 (1990)).

[0961] For parenteral administration, in one embodiment, the Therapeutic is formulated generally by mixing it at the desired degree of purity, in a unit dosage injectable form (solution, suspension, or emulsion), with a pharmaceutically acceptable carrier, i.e., one that is non-toxic to recipients at the dosages and concentrations employed and is compatible with other ingredients of the formulation. For example, the formulation preferably does not include oxidizing agents and other compounds that are known to be deleterious to the Therapeutic.

[0962] Generally, the formulations are prepared by contacting the Therapeutic uniformly and intimately with liquid carriers or finely divided solid carriers or both. Then, if necessary, the product is shaped into the desired formulation. Preferably the carrier is a parenteral carrier, more preferably a solution that is isotonic with the blood of the recipient. Examples of such carrier vehicles include water, saline, Ringer's solution, and dextrose solution. Non-aqueous vehicles such as fixed oils and ethyl oleate are also useful herein, as well as liposomes.

[0963] The carrier suitably contains minor amounts of additives such as substances that enhance isotonicity and chemical stability. Such materials are non-toxic to recipients at the dosages and concentrations employed, and include buffers such as phosphate, citrate, succinate, acetic acid, and other organic acids or their salts; antioxidants such as ascorbic acid; low molecular weight (less than about ten residues) polypeptides, e.g., polyarginine or tripeptides; proteins, such as serum albumin, gelatin, or immunoglobulins; hydrophilic polymers such as polyvinylpyrrolidone; amino acids, such as glycine, glutamic acid, aspartic acid, or arginine; monosaccharides, disaccharides, and other carbohydrates including cellulose or its derivatives, glucose, manose, or dextrins; chelating agents such as EDTA; sugar alcohols such as mannitol or sorbitol; counterions such as sodium; and/or nonionic surfactants such as polysorbates, poloxamers, or PEG.

[0964] The Therapeutic is typically formulated in such vehicles at a concentration of about 0.1 mg/ml to 100 mg/ml, preferably 1-10 mg/ml, at a pH of about 3 to 8. It will be understood that the use of certain of the foregoing excipients, carriers, or stabilizers will result in the formation of polypeptide salts.

[0965] Any pharmaceutical used for therapeutic administration can be sterile. Sterility is readily accomplished by filtration through sterile filtration membranes (e.g., 0.2 micron membranes). Therapeutics generally are placed into a container having a sterile access port, for example, an intravenous solution bag or vial having a stopper pierceable by a hypodermic injection needle.

[0966] Therapeutics ordinarily will be stored in unit or multi-dose containers, for example, sealed ampoules or vials, as an aqueous solution or as a lyophilized formulation for reconstitution. As an example of a lyophilized formulation, 10-ml vials are filled with 5 ml of sterile-filtered 1% (w/v) aqueous Therapeutic solution, and the resulting mixture is lyophilized. The infusion solution is prepared by reconstituting the lyophilized Therapeutic using bacteriostatic Water-for-Injection.

[0967] The invention also provides a pharmaceutical pack or kit comprising one or more containers filled with one or more of the ingredients of the Therapeutics of the invention. Associated with such container(s) can be a notice in the form prescribed by a governmental agency regulating the manufacture, use or sale of pharmaceuticals or biological products, which notice reflects approval by the agency of manufacture, use or sale for human administration. In addition, the Therapeutics may be employed in conjunction with other therapeutic compounds.

[0968] The Therapeutics of the invention may be administered alone or in combination with adjuvants. Adjuvants that may be administered with the Therapeutics of the invention include, but are not limited to, alum, alum plus deoxycholate (ImmunoAg), MTP-PE (Biocine Corp.), QS21 (Genentech, Inc.), BCG (e.g., THERACYS®), MPL and nonviable prepartions of Corynebacterium parvum. In a specific embodiment, Therapeutics of the invention are administered in combination with alum. In another specific embodiment, Therapeutics of the invention are administered in combination with QS-21. Further adjuvants that may be administered with the Therapeutics of the invention include, but are not limited to, Monophosphoryl lipid immunomodulator, AdjuVax 100a, QS-21, QS-18, CRL1005, Aluminum salts, MF-59, and Virosomal adjuvant technology. Vaccines that may be administered with the Therapeutics of the invention include, but are not limited to, vaccines directed toward protection against MMR (measles, mumps, rubella), polio, varicella, tetanus/diptheria, hepatitis A, hepatitis B, haemophilus influenzae B, whooping cough, pneumonia, influenza, Lyme's Disease, rotavirus, cholera, yellow fever, Japanese encephalitis, poliomyelitis, rabies, typhoid fever, and pertussis. Combinations may be administered either concomitantly, e.g., as an admixture, separately but simultaneously or concurrently; or sequentially. This includes presentations in which the combined agents are administered together as a therapeutic mixture, and also procedures in which the combined agents are administered separately but simultaneously, e.g., as through separate intravenous lines into the same individual. Administration “in combination” further includes the separate administration of one of the compounds or agents given first, followed by the second.

[0969] The Therapeutics of the invention may be administered alone or in combination with other therapeutic agents. Therapeutic agents that may be administered in combination with the Therapeutics of the invention, include but not limited to, chemotherapeutic agents, antibiotics, steroidal and non-steroidal anti-inflammatories, conventional immunotherapeutic agents, and/or therapeutic treatments described below. Combinations may be administered either concomitantly, e.g., as an admixture, separately but simultaneously or concurrently; or sequentially. This includes presentations in which the combined agents are administered together as a therapeutic mixture, and also procedures in which the combined agents are administered separately but simultaneously, e.g., as through separate intravenous lines into the same individual. Administration “in combination” further includes the separate administration of one of the compounds or agents given first, followed by the second.

[0970] In one embodiment, the Therapeutics of the invention are administered in combination with an anticoagulant. Anticoagulants that may be administered with the compositions of the invention include, but are not limited to, heparin, low molecular weight heparin, warfarin sodium (e.g., COUMADIN®), dicumarol, 4-hydroxycoumarin, anisindione (e.g., MIRADON™), acenocoumarol (e.g., nicoumalone, SINTHROME™), indan-1,3-dione, phenprocoumon (e.g., MARCUMAR™), ethyl biscoumacetate (e.g., TROMEXAN™), and aspirin. In a specific embodiment, compositions of the invention are administered in combination with heparin and/or warfarin. In another specific embodiment, compositions of the invention are administered in combination with warfarin. In another specific embodiment, compositions of the invention are administered in combination with warfarin and aspirin. In another specific embodiment, compositions of the invention are administered in combination with heparin. In another specific embodiment, compositions of the invention are administered in combination with heparin and aspirin.

[0971] In another embodiment, the Therapeutics of the invention are administered in combination with thrombolytic drugs. Thrombolytic drugs that may be administered with the compositions of the invention include, but are not limited to, plasminogen, lys-plasminogen, alpha2-antiplasmin, streptokinae (e.g., KABIKINASE™), antiresplace (e.g., EMINASE™), tissue plasminogen activator (t-PA, altevase, ACTIVASE™), urokinase (e.g., ABBOKINASE™), sauruplase, (Prourokinase, single chain urokinase), and aminocaproic acid (e.g., AMICAR™). In a specific embodiment, compositions of the invention are administered in combination with tissue plasminogen activator and aspirin.

[0972] In another embodiment, the Therapeutics of the invention are administered in combination with antiplatelet drugs. Antiplatelet drugs that may be administered with the compositions of the invention include, but are not limited to, aspirin, dipyridamole (e.g., PERSANTINE™), and ticlopidine (e.g., TICLID™).

[0973] In specific embodiments, the use of anti-coagulants, thrombolytic and/or antiplatelet drugs in combination with Therapeutics of the invention is contemplated for the prevention, diagnosis, and/or treatment of thrombosis, arterial thrombosis, venous thrombosis, thromboembolism, pulmonary embolism, atherosclerosis, myocardial infarction, transient ischemic attack, unstable angina. In specific embodiments, the use of anticoagulants, thrombolytic drugs and/or antiplatelet drugs in combination with Therapeutics of the invention is contemplated for the prevention of occulsion of saphenous grafts, for reducing the risk of periprocedural thrombosis as might accompany angioplasty procedures, for reducing the risk of stroke in patients with atrial fibrillation including nonrheumatic atrial fibrillation, for reducing the risk of embolism associated with mechanical heart valves and or mitral valves disease. Other uses for the therapeutics of the invention, alone or in combination with antiplatelet, anticoagulant, and/or thrombolytic drugs, include, but are not limited to, the prevention of occlusions in extracorporeal devices (e.g., intravascular canulas, vascular access shunts in hemodialysis patients, hemodialysis machines, and cardiopulmonary bypass machines).

[0974] In certain embodiments, Therapeutics of the invention are administered in combination with antiretroviral agents, nucleoside/nucleotide reverse transcriptase inhibitors (NRTIs), non-nucleoside reverse transcriptase inhibitors (NNRTIs), and/or protease inhibitors (PIs). NRTIs that may be administered in combination with the Therapeutics of the invention, include, but are not limited to, RETROVIR™ (zidovudine/AZT), VIDEX™ (didanosine/ddI), HIVID™ (zalcitabine/ddC), ZERIT™ (stavudine/d4T), EPIVIR™ (lamivudine/3TC), and COMBIVIR™ (zidovudine/lamivudine). NNRTIs that may be administered in combination with the Therapeutics of the invention, include, but are not limited to, VIRAMUNE™ (nevirapine), RESCRIPTOR™ (delavirdine), and SUSTIVA™ (efavirenz). Protease inhibitors that may be administered in combination with the Therapeutics of the invention, include, but are not limited to, CRIXIVAN™ (indinavir), NORVIR™ (ritonavir), INVIRASE™ (saquinavir), and VIRACEPT™ (nelfinavir). In a specific embodiment, antiretroviral agents, nucleoside reverse transcriptase inhibitors, non-nucleoside reverse transcriptase inhibitors, and/or protease inhibitors may be used in any combination with Therapeutics of the invention to treat AIDS and/or to prevent or treat HIV infection.

[0975] Additional NRTIs include LODENOSINE™ (F-ddA; an acid-stable adenosine NRTI; Triangle/Abbott; COVIRACIL™ (emtricitabine/FTC; structurally related to lamivudine (3TC) but with 3- to 10-fold greater activity in vitro; Triangle/Abbott); dOTC (BCH-10652, also structurally related to lamivudine but retains activity against a substantial proportion of lamivudine-resistant isolates; Biochem Pharma); Adefovir (refused approval for anti-HIV therapy by FDA; Gilead Sciences); PREVEON® (Adefovir Dipivoxil, the active prodrug of adefovir; its active form is PMEA-pp); TENOFOVIR™ (bis-POC PMPA, a PMPA prodrug; Gilead); DAPD/DXG (active metabolite of DAPD; Triangle/Abbott); D-D4FC (related to 3TC, with activity against AZT/3TC-resistant virus); GW420867X (Glaxo Wellcome); ZIAGEN™ (abacavir/159U89; Glaxo Wellcome Inc.); CS-87 (3′azido-2′, 3′-dideoxyuridine; WO 99/66936); and S-acyl-2-thioethyl (SATE)-bearing prodrug forms of β-L-FD4C and β-L-FddC (WO 98/17281).

[0976] Additional NNRTIs include COACTINON™ (Emivirine/MKC-442, potent NNRTI of the HEPT class; Triangle/Abbott); CAPRAVIRINE™ (AG-1549/S-1153, a next generation NNRTI with activity against viruses containing the K103N mutation; Agouron); PNU-142721 (has 20- to 50-fold greater activity than its predecessor delavirdine and is active against K103N mutants; Pharmacia & Upjohn); DPC-961 and DPC-963 (second-generation derivatives of efavirenz, designed to be active against viruses with the K103N mutation; DuPont); GW-420867X (has 25-fold greater activity than HBY097 and is active against K103N mutants; Glaxo Wellcome); CALANOLIDE A (naturally occurring agent from the latex tree; active against viruses containing either or both the Y181C and K103N mutations); and Propolis (WO 99/49830).

[0977] Additional protease inhibitors include LOPINAVIR™ (ABT378/r; Abbott Laboratories); BMS-232632 (an azapeptide; Bristol-Myres Squibb); TIPRANAVIR™ (PNU-140690, a non-peptic dihydropyrone; Pharmacia & Upjohn); PD-178390 (a nonpeptidic dihydropyrone; Parke-Davis); BMS 232632 (an azapeptide; Bristol-Myers Squibb); L-756,423 (an indinavir analog; Merck); DMP-450 (a cyclic urea compound; Avid & DuPont); AG-1776 (a peptidomimetic with in vitro activity against protease inhibitor-resistant viruses; Agouron); VX-175/GW-433908 (phosphate prodrug of amprenavir; Vertex & Glaxo Welcome); CGP61755 (Ciba); and AGENERASE™ (amprenavir; Glaxo Wellcome Inc.).

[0978] Additional antiretroviral agents include fusion inhibitors/gp41 binders. Fusion inhibitors/gp4l binders include T-20 (a peptide from residues 643-678 of the HIV gp4l transmembrane protein ectodomain which binds to gp41 in its resting state and prevents transformation to the fusogenic state; Trimeris) and T-1249 (a second-generation fusion inhibitor; Trimeris).

[0979] Additional antiretroviral agents include fusion inhibitors/chemokine receptor antagonists. Fusion inhibitors/chemokine receptor antagonists include CXCR4 antagonists such as AMD 3100 (a bicyclam), SDF-1 and its analogs, and ALX40-4C (a cationic peptide), T22 (an 18 amino acid peptide; Trimeris) and the T22 analogs T134 and T140; CCR5 antagonists such as RANTES (9-68), AOP-RANTES, NNY-RANTES, and TAK-779; and CCR5/CXCR4 antagonists such as NSC 651016 (a distamycin analog). Also included are CCR2B, CCR3, and CCR6 antagonists. Chemokine recpetor agonists such as RANTES, SDF-1, MIP-1α, MIP-1β, etc., may also inhibit fusion.

[0980] Additional antiretroviral agents include integrase inhibitors. Integrase inhibitors include dicaffeoylquinic (DFQA) acids; L-chicoric acid (a dicaffeoyltartaric (DCTA) acid); quinalizarin (QLC) and related anthraquinones; ZINTEVIR™ (AR 177, an oligonucleotide that probably acts at cell surface rather than being a true integrase inhibitor; Arondex); and naphthols such as those disclosed in WO 98/50347.

[0981] Additional antiretroviral agents include hydroxyurea-like compunds such as BCX-34 (a purine nucleoside phosphorylase inhibitor; Biocryst); ribonucleotide reductase inhibitors such as DIDOX™ (Molecules for Health); inosine monophosphate dehydrogenase (IMPDH) inhibitors sucha as VX-497 (Vertex); and mycopholic acids such as CellCept (mycophenolate mofetil; Roche).

[0982] Additional antiretroviral agents include inhibitors of viral integrase, inhibitors of viral genome nuclear translocation such as arylene bis(methylketone) compounds; inhibitors of HIV entry such as AOP-RANTES, NNY-RANTES, RANTES-IgG fusion protein, soluble complexes of RANTES and glycosaminoglycans (GAG), and AMD-3 100; nucleocapsid zinc finger inhibitors such as dithiane compounds; targets of HIV Tat and Rev; and pharmacoenhancers such as ABT-378.

[0983] Other antiretroviral therapies and adjunct therapies include cytokines and lymphokines such as MIP-1α, MIP-1β, SDF-1α, IL-2, PROLEUKIN™ (aldesleukin/L2-7001; Chiron), IL-4, IL-10, IL-12, and IL-13; interferons such as IFN-α2a; antagonists of TNFs, NFκB, GM-CSF, M-CSF, and IL-10; agents that modulate immune activation such as cyclosporin and prednisone; vaccines such as Remune™ (HIV Immunogen), APL 400-003 (Apollon), recombinant gp120 and fragments, bivalent (B/E) recombinant envelope glycoprotein, rgp120CM235, MN rgp120, SF-2 rgp120, gp120/soluble CD4 complex, Delta JR-FL protein, branched synthetic peptide derived from discontinuous gp120 C3/C4 domain, fusion-competent immunogens, and Gag, Pol, Nef, and Tat vaccines; gene-based therapies such as genetic suppressor elements (GSEs; WO 98/54366), and intrakines (genetically modified CC chemokines targetted to the ER to block surface expression of newly synthesized CCR5 (Yang et al., PNAS 94:11567-72 (1997); Chen et al., Nat. Med. 3:1110-16 (1997)); antibodies such as the anti-CXCR4 antibody 12G5, the anti-CCR5 antibodies 2D7, 5C7, PA8, PA9, PA10, PA11, PA12, and PA14, the anti-CD4 antibodies Q4120 and RPA-T4, the anti-CCR3 antibody 7B11, the anti-gp120 antibodies 17b, 48d, 447-52D, 257-D, 268-D and 50.1, anti-Tat antibodies, anti-TNF-a antibodies, and monoclonal antibody 33A; aryl hydrocarbon (AH) receptor agonists and antagonists such as TCDD, 3,3′, 4,4′, 5-pentachlorobiphenyl, 3,3′, 4,4′-tetrachlorobiphenyl, and α-naphthoflavone (WO 98/30213); and antioxidants such as γ-L-glutamyl-L-cysteine ethyl ester (γ-GCE; WO 99/56764).

[0984] In a further embodiment, the Therapeutics of the invention are administered in combination with an antiviral agent. Antiviral agents that may be administered with the Therapeutics of the invention include, but are not limited to, acyclovir, ribavirin, amantadine, and remantidine.

[0985] In other embodiments, Therapeutics of the invention may be administered in combination with anti-opportunistic infection agents. Anti-opportunistic agents that may be administered in combination with the Therapeutics of the invention, include, but are not limited to, TRIMETHOPRIM-SULFAMETHOXAZOLE™, DAPSONE™, PENTAMIDINE™, ATOVAQUONE™, ISONIAZID™, RIFAMPIN™, PYRAZINAMIDE™, ETHAMBUTOL™, RIFABUTIN™, CLARITHROMYCIN™, AZITHROMYCIN™, GANCICLOVIR™, FOSCARNET™, CIDOFOVIR™, FLUCONAZOLE™, ITRACONAZOLE™, KETOCONAZOLE™, ACYCLOVIR™, FAMCICOLVIR™, PYRIMETHAMINE™, LEUCOVORIN™, NEUPOGEN™ (filgrastim/G-CSF), and LEUKINE™ (sargramostim/GM-CSF). In a specific embodiment, Therapeutics of the invention are used in any combination with TRIMETHOPRIM-SULFAMETHOXAZOLE™, DAPSONE™, PENTAMIDINE™, and/or ATOVAQUONE™ to prophylactically treat or prevent an opportunistic Pneumocystis carinii pneumonia infection. In another specific embodiment, Therapeutics of the invention are used in any combination with ISONIAZID™, RIFAMPIN™, PYRAZINAMIDE™, and/or ETHAMBUTOL™ to prophylactically treat or prevent an opportunistic Mycobacterium avium complex infection. In another specific embodiment, Therapeutics of the invention are used in any combination with RIFABUTIN™, CLARITHROMYCIN™, and/or AZITHROMYCIN™ to prophylactically treat or prevent an opportunistic Mycobacterium tuberculosis infection. In another specific embodiment, Therapeutics of the invention are used in any combination with GANCICLOVIR™, FOSCARNET™, and/or CIDOFOVIR™ to prophylactically treat or prevent an opportunistic cytomegalovirus infection. In another specific embodiment, Therapeutics of the invention are used in any combination with FLUCONAZOLE™, ITRACONAZOLE™, and/or KETOCONAZOLE™ to prophylactically treat or prevent an opportunistic fungal infection. In another specific embodiment, Therapeutics of the invention are used in any combination with ACYCLOVIR™ and/or FAMCICOLVIR™ to prophylactically treat or prevent an opportunistic herpes simplex virus type I and/or type II infection. In another specific embodiment, Therapeutics of the invention are used in any combination with PYRIMETHAMINE™ and/or LEUCOVORIN™ to prophylactically treat or prevent an opportunistic Toxoplasma gondii infection. In another specific embodiment, Therapeutics of the invention are used in any combination with LEUCOVORIN™ and/or NEUPOGEN™ to prophylactically treat or prevent an opportunistic bacterial infection.

[0986] In a further embodiment, the Therapeutics of the invention are administered in combination with an antibiotic agent. Antibiotic agents that may be administered with the Therapeutics of the invention include, but are not limited to, amoxicillin, beta-lactamases, aminoglycosides, beta-lactam (glycopeptide), beta-lactamases, Clindamycin, chloramphenicol, cephalosporins, ciprofloxacin, erythromycin, fluoroquinolones, macrolides, metronidazole, penicillins, quinolones, rapamycin, rifampin, streptomycin, sulfonamide, tetracyclines, trimethoprim, trimethoprim-sulfamethoxazole, and vancomycin.

[0987] In other embodiments, the Therapeutics of the invention are administered in combination with immunestimulants. Immunostimulants that may be administered in combination with the Therapeutics of the invention include, but are not limited to, levamisole (e.g., ERGAMISOLTM), isoprinosine (e.g. INOSIPLEX™), interferons (e.g. interferon alpha), and interleukins (e.g., IL-2).

[0988] In other embodiments, Therapeutics of the invention are administered in combination with immunosuppressive agents. Immunosuppressive agents that may be administered in combination with the Therapeutics of the invention include, but are not limited to, steroids, cyclosporine, cyclosporine analogs, cyclophosphamide methylprednisone, prednisone, azathioprine, FK-506, 15-deoxyspergualin, and other immunosuppressive agents that act by suppressing the function of responding T cells. Other immunosuppressive agents that may be administered in combination with the Therapeutics of the invention include, but are not limited to, prednisolone, methotrexate, thalidomide, methoxsalen, rapamycin, leflunomide, mizoribine (BREDININ™), brequinar, deoxyspergualin, and azaspirane (SKF 105685), ORTHOCLONE OKT® 3 (muromonab-CD3), SANDIMMUNE™, NEORAL™, SANGDYA™ (cyclosporine), PROGRAF® (FK506, tacrolimus), CELLCEPT® (mycophenolate motefil, of which the active metabolite is mycophenolic acid), IMURAN™ (azathioprine), glucocorticosteroids, adrenocortical steroids such as DELTASONE™ (prednisone) and HYDELTRASOL™ (prednisolone), FOLEX™ and MEXATE™ (methotrxate), OXSORALEN-ULTRA™ (methoxsalen) and RAPAMUNE™ (sirolimus). In a specific embodiment, immunosuppressants may be used to prevent rejection of organ or bone marrow transplantation.

[0989] In an additional embodiment, Therapeutics of the invention are administered alone or in combination with one or more intravenous immune globulin preparations. Intravenous immune globulin preparations that may be administered with the Therapeutics of the invention include, but not limited to, GAMMAR™, IVEEGAM™, SANDOGLOBULIN™, GAMMAGARD S/D™, ATGAM™ (antithymocyte glubulin), and GAMIMUNE™. In a specific embodiment, Therapeutics of the invention are administered in combination with intravenous immune globulin preparations in transplantation therapy (e.g., bone marrow transplant).

[0990] In certain embodiments, the Therapeutics of the invention are administered alone or in combination with an anti-inflammatory agent. Anti-inflammatory agents that may be administered with the Therapeutics of the invention include, but are not limited to, corticosteroids (e.g. betamethasone, budesonide, cortisone, dexamethasone, hydrocortisone, methylprednisolone, prednisolone, prednisone, and triamcinolone), nonsteroidal anti-inflammatory drugs (e.g., diclofenac, diflunisal, etodolac, fenoprofen, floctafenine, flurbiprofen, ibuprofen, indomethacin, ketoprofen, meclofenamate, mefenamic acid, meloxicam, nabumetone, naproxen, oxaprozin, phenylbutazone, piroxicam, sulindac, tenoxicam, tiaprofenic acid, and tolmetin.), as well as antihistamines, aminoarylcarboxylic acid derivatives, arylacetic acid derivatives, arylbutyric acid derivatives, arylcarboxylic acids, arylpropionic acid derivatives, pyrazoles, pyrazolones, salicylic acid derivatives, thiazinecarboxamides, e-acetamidocaproic acid, S-adenosylmethionine, 3-amino-4-hydroxybutyric acid, amixetrine, bendazac, benzydamine, bucolome, difenpiramide, ditazol, emorfazone, guaiazulene, nabumetone, nimesulide, orgotein, oxaceprol, paranyline, perisoxal, pifoxime, proquazone, proxazole, and tenidap.

[0991] In an additional embodiment, the compositions of the invention are administered alone or in combination with an anti-angiogenic agent. Anti-angiogenic agents that may be administered with the compositions of the invention include, but are not limited to, Angiostatin (Entremed, Rockville, Md.), Troponin-1 (Boston Life Sciences, Boston, Mass.), anti-Invasive Factor, retinoic acid and derivatives thereof, paclitaxel (Taxol), Suramin, Tissue Inhibitor of Metalloproteinase-1, Tissue Inhibitor of Metalloproteinase-2, VEGI, Plasminogen Activator Inhibitor-1, Plasminogen Activator Inhibitor-2, and various forms of the lighter “d group” transition metals.

[0992] Lighter “d group” transition metals include, for example, vanadium, molybdenum, tungsten, titanium, niobium, and tantalum species. Such transition metal species may form transition metal complexes. Suitable complexes of the above-mentioned transition metal species include oxo transition metal complexes.

[0993] Representative examples of vanadium complexes include oxo vanadium complexes such as vanadate and vanadyl complexes. Suitable vanadate complexes include metavanadate and orthovanadate complexes such as, for example, ammonium metavanadate, sodium metavanadate, and sodium orthovanadate. Suitable vanadyl complexes include, for example, vanadyl acetylacetonate and vanadyl sulfate including vanadyl sulfate hydrates such as vanadyl sulfate mono- and trihydrates.

[0994] Representative examples of tungsten and molybdenum complexes also include oxo complexes. Suitable oxo tungsten complexes include tungstate and tungsten oxide complexes. Suitable tungstate complexes include ammonium tungstate, calcium tungstate, sodium tungstate dihydrate, and tungstic acid. Suitable tungsten oxides include tungsten (IV) oxide and tungsten (VI) oxide. Suitable oxo molybdenum complexes include molybdate, molybdenum oxide, and molybdenyl complexes. Suitable molybdate complexes include ammonium molybdate and its hydrates, sodium molybdate and its hydrates, and potassium molybdate and its hydrates. Suitable molybdenum oxides include molybdenum (VI) oxide, molybdenum (VI) oxide, and molybdic acid. Suitable molybdenyl complexes include, for example, molybdenyl acetylacetonate. Other suitable tungsten and molybdenum complexes include hydroxo derivatives derived from, for example, glycerol, tartaric acid, and sugars.

[0995] A wide variety of other anti-angiogenic factors may also be utilized within the context of the present invention. Representative examples include, but are not limited to, platelet factor 4; protamine sulphate; sulphated chitin derivatives (prepared from queen crab shells), (Murata et al., Cancer Res. 51:22-26, (1991)); Sulphated Polysaccharide Peptidoglycan Complex (SP-PG) (the function of this compound may be enhanced by the presence of steroids such as estrogen, and tamoxifen citrate); Staurosporine; modulators of matrix metabolism, including for example, proline analogs, cishydroxyproline, d,L-3,4-dehydroproline, Thiaproline, alpha,alpha-dipyridyl, aminopropionitrile fumarate; 4-propyl-5-(4-pyridinyl)-2(3H)-oxazolone; Methotrexate; Mitoxantrone; Heparin; Interferons; 2 Macroglobulin-serum; ChIMP-3 (Pavloff et al., J. Bio. Chem. 267:17321-17326, (1992)); Chymostatin (Tomkinson et al., Biochem J. 286:475-480, (1992)); Cyclodextrin Tetradecasulfate; Eponemycin; Camptothecin; Fumagillin (Ingber et al., Nature 348:555-557, (1990)); Gold Sodium Thiomalate (“GST”; Matsubara and Ziff, J. Clin. Invest. 79:1440-1446, (1987)); anticollagenase-serum; alpha2-antiplasmin (Holmes et al., J. Biol. Chem. 262(4):1659-1664, (1987)); Bisantrene (National Cancer Institute); Lobenzarit disodium (N-(2)-carboxyphenyl-4- chloroanthronilic acid disodium or “CCA”; (Takeuchi et al., Agents Actions 36:312-316, (1992)); and metalloproteinase inhibitors such as BB94.

[0996] Additional anti-angiogenic factors that may also be utilized within the context of the present invention include Thalidomide, (Celgene, Warren, N.J.); Angiostatic steroid; AGM-1470 (H. Brem and J. Folkman JPediatr. Surg. 28:445-51 (1993)); an integrin alpha v beta 3 antagonist (C. Storgard et al., J Clin. Invest. 103:47-54 (1999)); carboxynaminolmidazole; Carboxyamidotriazole (CAI) (National Cancer Institute, Bethesda, Md.); Conbretastatin A-4 (CA4P) (OXiGENE, Boston, Mass.); Squalamine (Magainin Pharmaceuticals, Plymouth Meeting, Pa.); TNP-470, (Tap Pharmaceuticals, Deerfield, Ill.); ZD-0101 AstraZeneca (London, UK); APRA (CT2584); Benefin, Byrostatin-1 (SC339555); CGP-41251 (PKC 412); CM101; Dexrazoxane (ICRF187); DMXAA; Endostatin; Flavopridiol; Genestein; GTE; ImmTher; Iressa (ZD1839); Octreotide (Somatostatin); Panretin; Penacillamine; Photopoint; PI-88; Prinomastat (AG-3340) Purlytin; Suradista (FCE26644); Tamoxifen (Nolvadex); Tazarotene; Tetrathiomolybdate; Xeloda (Capecitabine); and 5-Fluorouracil.

[0997] Anti-angiogenic agents'that may be administed in combination with the compounds of the invention may work through a variety of mechanisms including, but not limited to, inhibiting proteolysis of the extracellular matrix, blocking the function of endothelial cell-extracellular matrix adhesion molecules, by antagonizing the function of angiogenesis inducers such as growth factors, and inhibiting integrin receptors expressed on proliferating endothelial cells. Examples of anti-angiogenic inhibitors that interfere with extracellular matrix proteolysis and which may be administered in combination with the compositons of the invention include, but are not Imited to, AG-3340 (Agouron, La Jolla, Calif.), BAY-12-9566 (Bayer, West Haven, Conn.), BMS-275291 (Bristol Myers Squibb, Princeton, N.J.), CGS-27032A (Novartis, East Hanover, N.J.), Marimastat (British Biotech, Oxford, UK), and Metastat (Aeterna, St-Foy, Quebec). Examples of anti-angiogenic inhibitors that act by blocking the function of endothelial cell-extracellular matrix adhesion molecules and which may be administered in combination with the compositons of the invention include, but are not Imited to, EMD-121974 (Merck KcgaA Darmstadt, Germany) and Vitaxin (Ixsys, La Jolla, Calif./Medimmune, Gaithersburg, Md.). Examples of anti-angiogenic agents that act by directly antagonizing or inhibiting angiogenesis inducers and which may be administered in combination with the compositons of the invention include, but are not lmited to, Angiozyme (Ribozyme, Boulder, Colo.), Anti-VEGF antibody (Genentech, S. San Francisco, Calif.), PTK-787/ZK-225846 (Novartis, Basel, Switzerland), SU-101 (Sugen, S. San Francisco, Calif.), SU-5416 (Sugen/Pharmacia Upjohn, Bridgewater, N.J.), and SU-6668 (Sugen). Other anti-angiogenic agents act to indirectly inhibit angiogenesis. Examples of indirect inhibitors of angiogenesis which may be administered in combination with the compositons of the invention include, but are not limited to, IM-862 (Cytran, Kirkland, Wash.), Interferon-alpha, IL-12 (Roche, Nutley, N.J.), and Pentosan polysulfate (Georgetown University, Washington, D.C.).

[0998] In particular embodiments, the use of compositions of the invention in combination with anti-angiogenic agents is contemplated for the treatment, prevention, and/or amelioration of an autoimmune disease, such as for example, an autoimmune disease described herein.

[0999] In a particular embodiment, the use of compositions of the invention in combination with anti-angiogenic agents is contemplated for the treatment, prevention, and/or amelioration of arthritis. In a more particular embodiment, the use of compositions of the invention in combination with anti-angiogenic agents is contemplated for the treatment, prevention, and/or amelioration of rheumatoid arthritis.

[1000] In another embodiment, the polynucleotides encoding a polypeptide of the present invention are administered in combination with an angiogenic protein, or polynucleotides encoding an angiogenic protein. Examples of angiogenic proteins that may be administered with the compositions of the invention include, but are not limited to, acidic and basic fibroblast growth factors, VEGF-1, VEGF-2, VEGF-3, epidermal growth factor alpha and beta, platelet-derived endothelial cell growth factor, platelet-derived growth factor, tumor necrosis factor alpha, hepatocyte growth factor, insulin-like growth factor, colony stimulating factor, macrophage colony stimulating factor, granulocyte/macrophage colony stimulating factor, and nitric oxide synthase.

[1001] In additional embodiments, compositions of the invention are administered in combination with a chemotherapeutic agent. Chemotherapeutic agents that may be administered with the Therapeutics of the invention-include, but are not limited to alkylating agents such as nitrogen mustards (for example, Mechlorethamine, cyclophosphamide, Cyclophosphamide Ifosfamide, Melphalan (L-sarcolysin), and Chlorambucil), ethylenimines and methylmelamines (for example, Hexamethylmelamine and Thiotepa), alkyl sulfonates (for example, Busulfan), nitrosoureas (for example, Carmustine (BCNU), Lomustine (CCNU), Semustine (methyl-CCNU), and Streptozocin (streptozotocin)), triazenes (for example, Dacarbazine (DTIC; dimethyltriazenoimidazolecarboxamide)), folic acid analogs (for example, Methotrexate (amethopterin)), pyrimidine analogs (for example, Fluorouacil (5-fluorouracil; 5-FU), Floxuridine (fluorodeoxyuridine; FudR), and Cytarabine (cytosine arabinoside)), purine analogs and related inhibitors (for example, Mercaptopurine (6-mercaptopurine; 6-MP), Thioguanine (6-thioguanine; TG), and Pentostatin (2′-deoxycoformycin)), vinca alkaloids (for example, Vinblastine (VLB, vinblastine sulfate)) and Vincristine (vincristine sulfate)), epipodophyllotoxins (for example, Etoposide and Teniposide), antibiotics (for example, Dactinomycin (actinomycin D), Daunorubicin (daunomycin; rubidomycin), Doxorubicin, Bleomycin, Plicamycin (mithramycin), and Mitomycin (mitomycin C), enzymes (for example, L-Asparaginase), biological response modifiers (for example, Interferon-alpha and interferon-alpha-2b), platinum coordination compounds (for example, Cisplatin (cis-DDP) and Carboplatin), anthracenedione (Mitoxantrone), substituted ureas (for example, Hydroxyurea), methylhydrazine derivatives (for example, Procarbazine (N-methylhydrazine; MIH), adrenocorticosteroids (for example, Prednisone), progestins (for example, Hydroxyprogesterone caproate, Medroxyprogesterone, Medroxyprogesterone acetate, and Megestrol acetate), estrogens (for example, Diethylstilbestrol (DES), Diethylstilbestrol diphosphate, Estradiol, and Ethinyl estradiol), antiestrogens (for example, Tamoxifen), androgens (Testosterone proprionate, and Fluoxymesterone), antiandrogens (for example, Flutamide), gonadotropin-releasing horomone analogs (for example, Leuprolide), other hormones and hormone analogs (for example, methyltestosterone, estramustine, estramustine phosphate sodium, chlorotrianisene, and testolactone), and others (for example, dicarbazine, glutamic acid, and mitotane).

[1002] In one embodiment, the compositions of the invention are administered in combination with one or more of the following drugs: infliximab (also known as Remicade™ Centocor, Inc.), Trocade (Roche, RO-32-3555), Leflunomide (also known as Arava™ from Hoechst Marion Roussel), Kineret™ (an IL-1 Receptor antagonist also known as Anakinra from Amgen, Inc.)

[1003] In a specific embodiment, compositions of the invention are administered in combination with CHOP (cyclophosphamide, doxorubicin, vincristine, and prednisone) or combination of one or more of the components of CHOP. In one embodiment, the compositions of the invention are administered in combination with anti-CD20 antibodies, human monoclonal anti-CD20 antibodies. In another embodiment, the compositions of the invention are administered in combination with anti-CD20 antibodies and CHOP, or anti-CD20 antibodies and any combination of one or more of the components of CHOP, particularly cyclophosphamide and/or prednisone. In a specific embodiment, compositions of the invention are administered in combination with Rituximab. In a further embodiment, compositions of the invention are administered with Rituximab and CHOP, or Rituximab and any combination of one or more of the components of CHOP, particularly cyclophosphamide and/or prednisone. In a specific embodiment, compositions of the invention are administered in combination with tositumomab. In a further embodiment, compositions of the invention are administered with tositumomab and CHOP, or tositumomab and any combination of one or more of the components of CHOP, particularly cyclophosphamide and/or prednisone. The anti-CD20 antibodies may optionally be associated with radioisotopes, toxins or cytotoxic prodrugs.

[1004] In another specific embodiment, the compositions of the invention are administered in combination Zevalin™. In a further embodiment, compositions of the invention are administered with Zevalin™ and CHOP, or Zevalin™ and any combination of one or more of the components of CHOP, particularly cyclophosphamide and/or prednisone. Zevalin™ may be associated with one or more radisotopes. Particularly preferred isotopes are ⁹⁰Y and ¹¹¹In.

[1005] In an additional embodiment, the Therapeutics of the invention are administered in combination with cytokines. Cytokines that may be administered with the Therapeutics of the invention include, but are not limited to, IL2, IL3, IL4, IL5, IL6, IL7, IL10, IL12, IL13, IL15, anti-CD40, CD40L, IFN-gamma and TNF-alpha. In another embodiment, Therapeutics of the invention may be administered with any interleukin, including, but not limited to, IL-1alpha, IL-1beta, IL-2, IL-3, IL-4, IL-5, IL-6, IL-7, IL-8, IL-9, IL-10, IL-11, IL-12, IL-13, IL-14, IL-15, IL-16, IL-17, IL-18, IL-19, IL-20, and IL-21.

[1006] In one embodiment, the Therapeutics of the invention are administered in combination with members of the TNF family. TNF, TNF-related or TNF-like molecules that may be administered with the Therapeutics of the invention include, but are not limited to, soluble forms of TNF-alpha, lymphotoxin-alpha (LT-alpha, also known as TNF-beta), LT-beta (found in complex heterotrimer LT-alpha2-beta), OPGL, FasL, CD27L, CD30L, CD40L, 4-1BBL, DcR3, OX40L, TNF-gamma (International Publication No. WO 96/14328), AIM-I (International Publication No. WO 97/33899), endokine-alpha (International Publication No. WO 98/07880), OPG, and neutrokine-alpha (International Publication No. WO 98/18921, OX40, and nerve growth factor (NGF), and soluble forms of Fas, CD30, CD27, CD40 and 4-IBB, TR2 (International Publication No. WO 96/34095), DR3 (International Publication No. WO 97/33904), DR4 (International Publication No. WO 98/32856), TR5 (International Publication No. WO 98/30693), TRANK, TR9 (International Publication No. WO 98/56892),TR10 (International Publication No. WO 98/54202), 312C2 (International Publication No. WO 98/06842), and TR12, and soluble forms CD154, CD70, and CD153.

[1007] In an additional embodiment, the Therapeutics of the invention are administered in combination with angiogenic proteins. Angiogenic proteins that may be administered with the Therapeutics of the invention include, but are not limited to, Glioma Derived Growth Factor (GDGF), as disclosed in European Patent Number EP-399816; Platelet Derived Growth Factor-A (PDGF-A), as disclosed in European Patent Number EP-6821 10; Platelet Derived Growth Factor-B (PDGF-B), as disclosed in European Patent Number EP-282317; Placental Growth Factor (PlGF), as disclosed in International Publication Number WO 92/06194; Placental Growth Factor-2 (PlGF-2), as disclosed in Hauser et al., Growth Factors, 4:259-268 (1993); Vascular Endothelial Growth Factor (VEGF), as disclosed in International Publication Number WO 90/13649; Vascular Endothelial Growth Factor-A (VEGF-A), as disclosed in European Patent Number EP-506477; Vascular Endothelial Growth Factor-2 (VEGF-2), as disclosed in International Publication Number WO 96/39515; Vascular Endothelial Growth Factor B (VEGF-3); Vascular Endothelial Growth Factor B-186 (VEGF-B186), as disclosed in International Publication Number WO 96/26736; Vascular Endothelial Growth Factor-D (VEGF-D), as disclosed in International Publication Number WO 98/02543; Vascular Endothelial Growth Factor-D (VEGF-D), as disclosed in International Publication Number WO 98/07832; and Vascular Endothelial Growth Factor-E (VEGF-E), as disclosed in German Patent Number DE19639601. The above mentioned references are herein incorporated by reference in their entireties.

[1008] In an additional embodiment, the Therapeutics of the invention are administered in combination with Fibroblast Growth Factors. Fibroblast Growth Factors that may be administered with the Therapeutics of the invention include, but are not limited to, FGF-1, FGF-2, FGF-3, FGF-4, FGF-5, FGF-6, FGF-7, FGF-8, FGF-9, FGF-10, FGF-11, FGF-12, FGF-13, FGF-14, and FGF-15.

[1009] In an additional embodiment, the Therapeutics of the invention are administered in combination with hematopoietic growth factors. Hematopoietic growth factors that may be administered with the Therapeutics of the invention include, but are not limited to, granulocyte macrophage colony stimulating factor (GM-CSF) (sargramostim, LEUKINE™, PROKINE™), granulocyte colony stimulating factor (G-CSF) (filgrastim, NEUPOGEN™), macrophage colony stimulating factor (M-CSF, CSF-1) erythropoietin (epoetin alfa, EPOGEN™, PROCRIT™), stem cell factor (SCF, c-kit ligand, steel factor), megakaryocyte colony stimulating factor, PIXY321 (a GMCSF/IL-3 fusion protein), interleukins, especially any one or more of IL-1 through IL-12, interferon-gamma, or thrombopoietin.

[1010] In certain embodiments, Therapeutics of the present invention are administered in combination with adrenergic blockers, such as, for example, acebutolol, atenolol, betaxolol, bisoprolol, carteolol, labetalol, metoprolol, nadolol, oxprenolol, penbutolol, pindolol, propranolol, sotalol, and timolol.

[1011] In another embodiment, the Therapeutics of the invention are administered in combination with an antiarrhythmic drug (e.g., adenosine, amidoarone, bretylium, digitalis, digoxin, digitoxin, diliazem, disopyramide, esmolol, flecainide, lidocaine, mexiletine, moricizine, phenytoin, procainamide, N-acetyl procainamide, propafenone, propranolol, quinidine, sotalol, tocainide, and verapamil).

[1012] In another embodiment, the Therapeutics of the invention are administered in combination with diuretic agents, such as carbonic anhydrase-inhibiting agents (e.g., acetazolamide, dichlorphenamide, and methazolamide), osmotic diuretics (e.g., glycerin, isosorbide, mannitol, and urea), diuretics that inhibit Na⁺-K⁺-2Cl⁻ symport (e.g., furosemide, bumetanide, azosemide, piretanide, tripamide, ethacrynic acid, muzolimine, and torsemide), thiazide and thiazide-like diuretics (e.g., bendroflumethiazide, benzthiazide, chlorothiazide, hydrochlorothiazide, hydroflumethiazide, methyclothiazide, polythiazide, trichormethiazide, chjorthalidone, indapamide, metolazone, and quinethazone), potassium sparing diuretics (e.g., amiloride and triamterene), and mineralcorticoid receptor antagonists (e.g., spironolactone, canrenone, and potassium canrenoate).

[1013] In one embodiment, the Therapeutics of the invention are administered in combination with treatments for endocrine and/or hormone imbalance disorders. Treatments for endocrine and/or hormone imbalance disorders include, but are not limited to, ¹²⁷I, radioactive isotopes of iodine such as ¹³¹I and ¹²³I; recombinant growth hormone, such as HUMATROPE™ (recombinant somatropin); growth hormone analogs such as PROTROPIN™ (somatrem); dopamine agonists such as PARLODEL™ (bromocriptine); somatostatin analogs such as SANDOSTATIN™ (octreotide); gonadotropin preparations such as PREGNYL™, A.P.L.™ and PROFASI™ (chorionic gonadotropin (CG)), PERGONAL™ (menotropins), and METRODIN™ (urofollitropin (uFSH)); synthetic human gonadotropin releasing hormone preparations such as FACTREL™ and LUTREPULSE™ (gonadorelin hydrochloride); synthetic gonadotropin agonists such as LUPRON™ (leuprolide acetate), SUPPRELIN™ (histrelin acetate), SYNAREL™ (nafarelin acetate), and ZOLADEX™ (goserelin acetate); synthetic preparations of thyrotropin-releasing hormone such as RELEFACT TRH™ and THYPINONE™ (protirelin); recombinant human TSH such as THYROGEN™; synthetic preparations of the sodium salts of the natural isomers of thyroid hormones such as L-T₄™, SYNTHROID™ and LEVOTHROID™ (levothyroxine sodium), L-T₃™, CYTOMEL™ and TRIOSTAT™ (liothyroine sodium), and THYROLAR™ (liotrix); antithyroid compounds such as 6-n-propylthiouracil (propylthiouracil), 1-methyl-2-mercaptoimidazole and TAPAZOLE™ (methimazole), NEO-MERCAZOLE™ (carbimazole); beta-adrenergic receptor antagonists such as propranolol and esmolol; Ca²⁺ channel blockers; dexamethasone and iodinated radiological contrast agents such as TELEPAQUE™ (iopanoic acid) and ORAGRAFIN™ (sodium ipodate).

[1014] Additional treatments for endocrine and/or hormone imbalance disorders include, but are not limited to, estrogens or congugated estrogens such as ESTRACE™ (estradiol), ESTINYL™ (ethinyl estradiol), PREMARIN™, ESTRATAB™, ORTHO-EST™, OGEN™ and estropipate (estrone), ESTROVIS™ (quinestrol), ESTRADERM™ (estradiol), DELESTROGEN™ and VALERGEN™ (estradiol valerate), DEPO-ESTRADIOL CYPIONATE™ and ESTROJECT LA™ (estradiol cypionate); antiestrogens such as NOLVADEX™ (tamoxifen), SEROPHENE™ and CLOMID™ (clomiphene); progestins such as DURALUTIN™ (hydroxyprogesterone caproate), MPA™ and DEPO-PROVERA™ (medroxyprogesterone acetate), PROVERA™ and CYCRIN™ (MPA), MEGACE™ (megestrol acetate), NORLUTIN™ (norethindrone), and NORLUTATE™ and AYGESTIN™ (norethindrone acetate); progesterone implants such as NORPLANT SYSTEM (subdermal implants of norgestrel); antiprogestins such as RU 486™ (mifepristone); hormonal contraceptives such as ENOVID™ (norethynodrel plus mestranol), PROGESTASERT™ (intrauterine device that releases progesterone), LOESTRIN™, BREVICON™, MODICON™, GENORA™, NELONA™, NORINYL™, OVACON-35™ and OVACON-50™ (ethinyl estradiol/norethindrone), LEVLEN™, NORDETTE™, TRI-LEVLEN™ and TRIPHASIL-21™ (ethinyl estradiol/levonorgestrel) LO/OVRAL™ and OVRAL™ (ethinyl estradiol/norgestrel), DEMULEN™ (ethinyl estradiol/ethynodiol diacetate), NORINYL™, ORTHO-NOVUM™, NORETHIN™, GENORA™, and NELOVA™ (norethindrone/mestranol), DESOGEN™ and ORTHO-CEPT™ (ethinyl estradiol/desogestrel), ORTHO-CYCLEN™ and ORTHO-TRICYCLEN™ (ethinyl estradiol/norgestimate), MICRONOR™ and NOR-QD™ (norethindrone), and OVRETTE™ (norgestrel).

[1015] Additional treatments for endocrine and/or hormone imbalance disorders include, but are not limited to, testosterone esters such as methenolone acetate and testosterone undecanoate; parenteral and oral androgens such as TESTOJECT-50™ (testosterone), TESTEX™ (testosterone propionate), DELATESTRYL™ (testosterone enanthate), DEPO-TESTOSTERONE™ (testosterone cypionate), DANOCRINE™ (danazol), HALOTESTIN™ (fluoxymesterone), ORETON METHYL™, TESTRED™ and VIRILON™ (methyltestosterone), and OXANDRIN™ (oxandrolone); testosterone transdermal systems such as TESTODERM™; androgen receptor antagonist and 5-alpha-reductase inhibitors such as ANDROCUR™ (cyproterone acetate), EULEXIN™ (flutamide), and PROSCAR™ (finasteride); adrenocorticotropic hormone preparations such as CORTROSYN™ (cosyntropin); adrenocortical steroids and their synthetic analogs such as ACLOVATE™ (alclometasone dipropionate), CYCLOCORT™ (amcinonide), BECLOVENT™ and VANCERIL™ (beclomethasone dipropionate), CELESTONE™ (betamethasone), BENISONE™ and UTICORT™ (betamethasone benzoate), DIPROSONE™ (betamethasone dipropionate), CELESTONE PHOSPHATE™ (betamethasone sodium phosphate), CELESTONE SOLUSPAN™ (betamethasone sodium phosphate and acetate), BETA-VAL™ and VALISONE™ (betamethasone valerate), TEMOVATE™ (clobetasol propionate), CLODERM™ (clocortolone pivalate), CORTEF™ and HYDROCORTONE™ (cortisol (hydrocortisone)), HYDROCORTONE ACETATE™ (cortisol (hydrocortisone) acetate), LOCOID™ (cortisol (hydrocortisone) butyrate), HYDROCORTONE™ PHOSPHATE™ (cortisol (hydrocortisone) sodium phosphate), A-HYDROCORT™ and SOLU CORTEF™ (cortisol (hydrocortisone) sodium succinate), WESTCORT™ (cortisol (hydrocortisone) valerate), CORTISONE ACETATE™ (cortisone acetate), DESOWEN™ and TRIDESILON™ (desonide), TOPICORT™ (desoximetasone), DECADRON™ (dexamethasone), DECADRON LA™ (dexamethasone acetate), DECADRON PHOSPHATE™ and HEXADROL PHOSPHATE™ (dexamethasone sodium phosphate), FLORONE™ and MAXIFLOR™ (diflorasone diacetate), FLORINEF ACETATE™ (fludrocortisone acetate), AEROBID™ and NASALIDE™ (flunisolide), FLUONID™ and SYNALAR™ (fluocinolone acetonide), LIDEX™ (fluocinonide), FLUOR-OP™ and FML™ (fluorometholone), CORDRAN™ (flurandrenolide), HALOG™ (halcinonide), HMS LIZUIFILM™ (medrysone), MEDROL™ (methylprednisolone), DEPO-MEDROL™ and MEDROL ACETATE™ (methylprednisone acetate), A-METHAPRED™ and SOLUMEDROL™ (methylprednisolone sodium succinate), ELOCON™ (mometasone furoate), HALDRONE™ (paramethasone acetate), DELTA-CORTEF™ (prednisolone), ECONOPRED™ (prednisolone acetate), HYDELTRASOL™ (prednisolone sodium phosphate), HYDELTRA-T.B.A™. (prednisolone tebutate), DELTASONE™ (prednisone), ARISTOCORT™ and KENACORT™ (triamcinolone), KENALOG™ (triamcinolone acetonide), ARISTOCORT™ and KENACORT DIACETATE™ (triamcinolone diacetate), and ARISTOSPAN™ (triamcinolone hexacetonide); inhibitors of biosynthesis and action of adrenocortical steroids such as CYTADREN™ (aminoglutethimide), NIZORAL™ (ketoconazole), MODRASTANE™ (trilostane), and METOPIRONE™ (metyrapone); bovine, porcine or human insulin or mixtures thereof; insulin analogs; recombinant human insulin such as HUMULIN™ and NOVOLIN™; oral hypoglycemic agents such as ORAMIDE™ and ORINASE™ (tolbutamide), DIABINESE™ (chlorpropamide), TOLAMIDE™ and TOLINASE™ (tolazamide), DYMELOR™ (acetohexamide), glibenclamide, MICRONASE™, DIBETA™ and GLYNASE™ (glyburide), GLUCOTROL™ (glipizide), and DIAMICRON™ (gliclazide), GLUCOPHAGE™ (metformin), ciglitazone, pioglitazone, and alpha-glucosidase inhibitors; bovine or porcine glucagon; somatostatins such as SANDOSTATIN™ (octreotide); and diazoxides such as PROGLYCEM™ (diazoxide).

[1016] In one embodiment, the Therapeutics of the invention are administered in combination with treatments for uterine motility disorders. Treatments for uterine motility disorders include, but are not limited to, estrogen drugs such as conjugated estrogens (e.g., PREMARIN® and ESTRATAB®), estradiols (e.g., CLIMARA® and ALORA®), estropipate, and chlorotrianisene; progestin drugs (e.g., AMEN® (medroxyprogesterone), MICRONOR® (norethidrone acetate), PROMETRIUM® progesterone, and megestrol acetate); and estrogen/progesterone combination therapies such as, for example, conjugated estrogens/medroxyprogesterone (e.g., PREMPRO™ and PREMPHASE®) and norethindrone acetate/ethinyl estsradiol (e.g., FEMHRT™).

[1017] In an additional embodiment, the Therapeutics of the invention are administered in combination with drugs effective in treating iron deficiency and hypochromic anemias, including but not limited to, ferrous sulfate (iron sulfate, FEOSOL™), ferrous fumarate (e.g., FEOSTAT™), ferrous gluconate (e.g., FERGON™), polysaccharide-iron complex (e.g., NIFEREX™), iron dextran injection (e.g., INFED™), cupric sulfate, pyroxidine, riboflavin, Vitamin B₁₂, cyancobalamin injection (e.g., REDISOL™, RUBRAMIN PC™), hydroxocobalamin, folic acid (e.g., FOLVITE™), leucovorin (folinic acid, 5-CHOH4PteGlu, citrovorum factor) or WELLCOVORIN (Calcium salt of leucovorin), transferrin or ferritin.

[1018] In certain embodiments, the Therapeutics of the invention are administered in combination with agents used to treat psychiatric disorders. Psychiatric drugs that may be administered with the Therapeutics of the invention include, but are not limited to, antipsychotic agents (e.g., chlorpromazine, chlorprothixene, clozapine, fluphenazine, haloperidol, loxapine, mesoridazine, molindone, olanzapine, perphenazine, pimozide, quetiapine, risperidone, thioridazine, thiothixene, trifluoperazine, and triflupromazine), antimanic agents (e.g., carbamazepine, divalproex sodium, lithium carbonate, and lithium citrate), antidepressants (e.g., amitriptyline, amoxapine, bupropion, citalopram, clomipramine, desipramine, doxepin, fluvoxamine, fluoxetine, imipramine, isocarboxazid, maprotiline, mirtazapine, nefazodone, nortriptyline, paroxetine, phenelzine, protriptyline, sertraline, tranylcypromine, trazodone, trimipramine, and venlafaxine), antianxiety agents (e.g., alprazolam, buspirone, chlordiazepoxide, clorazepate, diazepam, halazepam, lorazepam, oxazepam, and prazepam), and stimulants (e.g., d-amphetamine, methylphenidate, and pemoline).

[1019] In other embodiments, the Therapeutics of the invention are administered in combination with agents used to treat neurological disorders. Neurological agents that may be administered with the Therapeutics of the invention include, but are not limited to, antiepileptic agents (e.g., carbamazepine, clonazepam, ethosuximide, phenobarbital, phenytoin, primidone, valproic acid, divalproex sodium, felbamate, gabapentin, lamotrigine, levetiracetam, oxcarbazepine, tiagabine, topiramate, zonisamide, diazepam, lorazepam, and clonazepam), antiparkinsonian agents (e.g., levodopa/carbidopa, selegiline, amantidine, bromocriptine, pergolide, ropinirole, pramipexole, benztropine; biperiden; ethopropazine; procyclidine; trihexyphenidyl, tolcapone), and ALS therapeutics (e.g. riluzole).

[1020] In another embodiment, Therapeutics of the invention are administered in combination with vasodilating agents and/or calcium channel blocking agents. Vasodilating agents that may be administered with the Therapeutics of the invention include, but are not limited to, Angiotensin Converting Enzyme (ACE) inhibitors (e.g., papaverine, isoxsuprine, benazepril, captopril, cilazapril, enalapril, enalaprilat, fosinopril, lisinopril, moexipril, perindopril, quinapril, ramipril, spirapril, trandolapril, and nylidrin), and nitrates (e.g., isosorbide dinitrate, isosorbide mononitrate, and nitroglycerin). Examples of calcium channel blocking agents that may be administered in combination with the Therapeutics of the invention include, but are not limited to amlodipine, bepridil, diltiazem, felodipine, flunarizine, isradipine, nicardipine, nifedipine, nimodipine, and verapamil.

[1021] In certain embodiments, the Therapeutics of the invention are administered in combination with treatments for gastrointestinal disorders. Treatments for gastrointestinal disorders that may be administered with the Therapeutic of the invention include, but are not limited to, H₂ histamine receptor antagonists (e.g., TAGAMET™ (cimetidine), ZANTAC™ (ranitidine), PEPCID™ (famotidine), and AXID™ (nizatidine)); inhibitors of H⁺, K⁺ ATPase (e.g., PREVACID™ (lansoprazole) and PRILOSEC™ (omeprazole)); Bismuth compounds (e.g., PEPTO-BISMOL™ (bismuth subsalicylate) and DE-NOL™ (bismuth subcitrate)); various antacids; sucralfate; prostaglandin analogs (e.g. CYTOTEC™ (misoprostol)); muscarinic cholinergic antagonists; laxatives (e.g., surfactant laxatives, stimulant laxatives, saline and osmotic laxatives); antidiarrheal agents (e.g., LOMOTIL™ (diphenoxylate), MOTOFEN™ (diphenoxin), and IMODIUM™ (loperamide hydrochloride)), synthetic analogs of somatostatin such as SANDOSTATIN™ (octreotide), antiemetic agents (e.g., ZOFRAN™ (ondansetron), KYTRIL™ (granisetron hydrochloride), tropisetron, dolasetron, metoclopramide, chlorpromazine, perphenazine, prochlorperazine, promethazine, thiethylperazine, triflupromazine, domperidone, haloperidol, droperidol, trimethobenzamide, dexamethasone, methylprednisolone, dronabinol, and nabilone); D2 antagonists (e.g., metoclopramide, trimethobenzamide and chlorpromazine); bile salts; chenodeoxycholic acid; ursodeoxycholic acid; and pancreatic enzyme preparations such as pancreatin and pancrelipase.

[1022] In additional embodiments, the Therapeutics of the invention are administered in combination with other therapeutic or prophylactic regimens, such as, for example, radiation therapy.

### Example 14

### Method of Treating Decreased Levels of the Polypeptide

[1023] The present invention relates to a method for treating an individual in need of an increased level of a polypeptide of the invention in the body comprising administering to such an individual a composition comprising a therapeutically effective amount of an agonist of the invention (including polypeptides of the invention). Moreover, it will be appreciated that conditions caused by a decrease in the standard or normal expression level of a polypeptide of the present invention in an individual can be treated by administering the agonist or antagonist of the present invention. Thus, the invention also provides a method of treatment of an individual in need of an increased level of the polypeptide comprising administering to such an individual a Therapeutic comprising an amount of the agonist or antagonist to increase the activity level of the polypeptide in such an individual.

[1024] For example, a patient with decreased levels of a polypeptide receives a daily dose 0.1-100 ug/kg of the agonist or antagonist for six consecutive days. The exact details of the dosing scheme, based on administration and formulation, are provided in Example 13.

### Example 15

### Method of Treating Increased Levels of the Polypeptide

[1025] The present invention also relates to a method of treating an individual in need of a decreased level of a polypeptide of the invention in the body comprising administering to such an individual a composition comprising a therapeutically effective amount of an antagonist of the invention (including polypeptides and antibodies of the invention).

[1026] In one example, antisense technology is used to inhibit production of a polypeptide of the present invention. This technology is one example of a method of decreasing levels of a polypeptide, due to a variety of etiologies, such as cancer.

[1027] For example, a patient diagnosed with abnormally increased levels of a polypeptide is administered intravenously antisense polynucleotides at 0.5, 1.0, 1.5, 2.0 and 3.0 mg/kg day for 21 days. This treatment is repeated after a 7-day rest period if the treatment was well tolerated. The antisense polynucleotides of the present invention can be formulated using techniques and formulations described herein (e.g. see Example 13), or otherwise known in the art.

### Example 16

### Method of Treatment Using Gene Therapy-Ex Vivo

[1028] One method of gene therapy transplants fibroblasts, which are capable of expressing a polypeptide, onto a patient. Generally, fibroblasts are obtained from a subject by skin biopsy. The resulting tissue is placed in tissue-culture medium and separated into small pieces. Small chunks of the tissue are placed on a wet surface of a tissue culture flask, approximately ten pieces are placed in each flask. The flask is turned upside down, closed tight and left at room temperature over night. After 24 hours at room temperature, the flask is inverted and the chunks of tissue remain fixed to the bottom of the flask and fresh media (e.g., Ham's F12 media, with 10% FBS, penicillin and streptomycin) is added. The flasks are then incubated at 37 degree C for approximately one week.

[1029] At this time, fresh media is added and subsequently changed every several days. After an additional two weeks in culture, a monolayer of fibroblasts emerge. The monolayer is trypsinized and scaled into larger flasks.

[1030] pMV-7 (Kirschmeier, P. T. et al., DNA, 7:219-25 (1988)), flanked by the long terminal repeats of the Moloney murine sarcoma virus, is digested with EcoRI and HindIII and subsequently treated with calf intestinal phosphatase. The linear vector is fractionated on agarose gel and purified, using glass beads.

[1031] The cDNA encoding a polypeptide of the present invention can be amplified using PCR primers which correspond to the 5′ and 3′ end sequences respectively as set forth in Example 1 using primers and having appropriate restriction sites and initiation/stop codons, if necessary. Preferably, the 5′ primer contains an EcoRI site and the 3′ primer includes a HindIII site. Equal quantities of the Moloney murine sarcoma virus linear backbone and the amplified EcoRI and HindIII fragment are added together, in the presence of T4 DNA ligase. The resulting mixture is maintained under conditions appropriate for ligation of the two fragments. The ligation mixture is then used to transform bacteria HB101, which are then plated onto agar containing kanamycin for the purpose of confirming that the vector has the gene of interest properly inserted.

[1032] The amphotropic pA317 or GP+am12 packaging cells are grown in tissue culture to confluent density in Dulbecco's Modified Eagles Medium (DMEM) with 10% calf serum (CS), penicillin and streptomycin. The MSV vector containing the gene is then added to the media and the packaging cells transduced with the vector. The packaging cells now produce infectious viral particles containing the gene (the packaging cells are now referred to as producer cells).

[1033] Fresh media is added to the transduced producer cells, and subsequently, the media is harvested from a 10 cm plate of confluent producer cells. The spent media, containing the infectious viral particles, is filtered through a millipore filter to remove detached producer cells and this media is then used to infect fibroblast cells. Media is removed from a sub-confluent plate of fibroblasts and quickly replaced with the media from the producer cells. This media is removed and replaced with fresh media. If the titer of virus is high, then virtually all fibroblasts will be infected and no selection is required. If the titer is very low, then it is necessary to use a retroviral vector that has a selectable marker, such as neo or his. Once the fibroblasts have been efficiently infected, the fibroblasts are analyzed to determine whether protein is produced.

[1034] The engineered fibroblasts are then transplanted onto the host, either alone or after having been grown to confluence on cytodex 3 microcarrier beads.

### Example 17

### Gene Therapy Using Endogenous Genes Corresponding To Polynucleotides of the Invention

[1035] Another method of gene therapy according to the present invention involves operably associating the endogenous polynucleotide sequence of the invention with a promoter via homologous recombination as described, for example, in U.S. Pat. No. 5,641,670, issued Jun. 24, 1997; International Publication NO: WO 96/29411, published Sep. 26, 1996; International Publication NO: WO 94/12650, published Aug. 4, 1994; Koller et al., Proc. Natl. Acad. Sci. USA, 86:8932-8935 (1989); and Zijlstra et al., Nature, 342:435-438 (1989). This method involves the activation of a gene which is present in the target cells, but which is not expressed in the cells, or is expressed at a lower level than desired.

[1036] Polynucleotide constructs are made which contain a promoter and targeting sequences, which are homologous to the 5′ non-coding sequence of endogenous polynucleotide sequence, flanking the promoter. The targeting sequence will be sufficiently near the 5′ end of the polynucleotide sequence so the promoter will be operably linked to the endogenous sequence upon homologous recombination. The promoter and the targeting sequences can be amplified using PCR. Preferably, the amplified promoter contains distinct restriction enzyme sites on the 5′ and 3′ ends. Preferably, the 3′ end of the first targeting sequence contains the same restriction enzyme site as the 5′ end of the amplified promoter and the 5′ end of the second targeting sequence contains the same restriction site as the 3′ end of the amplified promoter.

[1037] The amplified promoter and the amplified targeting sequences are digested with the appropriate restriction enzymes and subsequently treated with calf intestinal phosphatase. The digested promoter and digested targeting sequences are added together in the presence of T4 DNA ligase. The resulting mixture is maintained under conditions appropriate for ligation of the two fragments. The construct is size fractionated on an agarose gel, then purified by phenol extraction and ethanol precipitation.

[1038] In this Example, the polynucleotide constructs are administered as naked polynucleotides via electroporation. However, the polynucleotide constructs may also be administered with transfection-facilitating agents, such as liposomes, viral sequences, viral particles, precipitating agents, etc. Such methods of delivery are known in the art.

[1039] Once the cells are transfected, homologous recombination will take place which results in the promoter being operably linked to the endogenous polynucleotide sequence. This results in the expression of polynucleotide corresponding to the polynucleotide in the cell. Expression may be detected by immunological staining, or any other method known in the art.

[1040] Fibroblasts are obtained from a subject by skin biopsy. The resulting tissue is placed in DMEM+10% fetal calf serum. Exponentially growing or early stationary phase fibroblasts are trypsinized and rinsed from the plastic surface with nutrient medium. An aliquot of the cell suspension is removed for counting, and the remaining cells are subjected to centrifugation. The supernatant is aspirated and the pellet is resuspended in 5 ml of electroporation buffer (20 mM HEPES pH 7.3, 137 mM NaCl, 5 mM KCl, 0.7 mM Na₂ HPO₄, 6 mM dextrose). The cells are recentrifuged, the supernatant aspirated, and the cells resuspended in electroporation buffer containing 1 mg/ml acetylated bovine serum albumin. The final cell suspension contains approximately 3×10⁶ cells/ml. Electroporation should be performed immediately following resuspension.

[1041] Plasmid DNA is prepared according to standard techniques. For example, to construct a plasmid for targeting to the locus corresponding to the polynucleotide of the invention, plasmid pUC18 (MBI Fermentas, Amherst, N.Y.) is digested with HindIII. The CMV promoter is amplified by PCR with an XbaI site on the 5′ end and a BamHI site on the 3′ end. Two non-coding sequences are amplified via PCR: one non-coding sequence (fragment 1) is amplified with a HindIII site at the 5′ end and an Xba site at the 3′end; the other non-coding sequence (fragment 2) is amplified with a BamHI site at the 5′end and a HindIII site at the 3′end. The CMV promoter and the fragments (1 and 2) are digested with the appropriate enzymes (CMV promoter—XbaI and BamHI; fragment 1—XbaI; fragment 2—BamHI) and ligated together. The resulting ligation product is digested with HindIII, and ligated with the HindIII-digested pUC 18 plasmid.

[1042] Plasmid DNA is added to a sterile cuvette with a 0.4 cm electrode gap (Bio-Rad). The final DNA concentration is generally at least 120 μg/ml. 0.5 ml of the cell suspension (containing approximately 1.5.×10⁶ cells) is then added to the cuvette, and the cell suspension and DNA solutions are gently mixed. Electroporation is performed with a Gene-Pulser apparatus (Bio-Rad). Capacitance and voltage are set at 960 μF and 250-300 V, respectively. As voltage increases, cell survival decreases, but the percentage of surviving cells that stably incorporate the introduced DNA into their genome increases dramatically. Given these parameters, a pulse time of approximately 14-20 mSec should be observed.

[1043] Electroporated cells are maintained at room temperature for approximately 5 min, and the contents of the cuvette are then gently removed with a sterile transfer pipette. The cells are added directly to 10 ml of prewarmed nutrient media (DMEM with 15% calf serum) in a 10 cm dish and incubated at 37 degree C. The following day, the media is aspirated and replaced with 10 ml of fresh media and incubated for a further 16-24 hours.

[1044] The engineered fibroblasts are then injected into the host, either alone or after having been grown to confluence on cytodex 3 microcarrier beads. The fibroblasts now produce the protein product. The fibroblasts can then be introduced into a patient as described above.

### Example 18

### Method of Treatment Using Gene Therapy—In Vivo

[1045] Another aspect of the present invention is using in vivo gene therapy methods to treat disorders, diseases and conditions. The gene therapy method relates to the introduction of naked nucleic acid (DNA, RNA, and antisense DNA or RNA) sequences into an animal to increase or decrease the expression of the polypeptide. The polynucleotide of the present invention may be operatively linked to (i.e., associated with) a promoter or any other genetic elements necessary for the expression of the polypeptide by the target tissue. Such gene therapy and delivery techniques and methods are known in the art, see, for example, WO90/11092, WO98/11779; U.S. Pat. No. 5,693,622, 5,705,151, 5,580,859; Tabata et al., Cardiovasc. Res. 35(3):470-479 (1997); Chao et al., Pharmacol. Res. 35(6):517-522 (1997); Wolff, Neuromuscul. Disord. 7(5):314-318 (1997); Schwartz et al., Gene Ther. 3(5):405-411 (1996); Tsurumi et al., Circulation 94(12):3281-3290 (1996) (incorporated herein by reference).

[1046] The polynucleotide constructs may be delivered by any method that delivers injectable materials to the cells of an animal, such as, injection into the interstitial space of tissues (heart, muscle, skin, lung, liver, intestine and the like). The polynucleotide constructs can be delivered in a pharmaceutically acceptable liquid or aqueous carrier.

[1047] The term “naked” polynucleotide, DNA or RNA, refers to sequences that are free from any delivery vehicle that acts to assist, promote, or facilitate entry into the cell, including viral sequences, viral particles, liposome formulations, lipofectin or precipitating agents and the like. However, the polynucleotides of the present invention may also be delivered in liposome formulations (such as those taught in Felgner P.L. et al. (1995) Ann. NY Acad. Sci. 772:126-139 and Abdallah B. et al. (1995) Biol. Cell 85(1):1-7) which can be prepared by methods well known to those skilled in the art.

[1048] The polynucleotide vector constructs used in the gene therapy method are preferably constructs that will not integrate into the host genome nor will they contain sequences that allow for replication. Any strong promoter known to those skilled in the art can be used for driving the expression of DNA. Unlike other gene therapy techniques, one major advantage of introducing naked nucleic acid sequences into target cells is the transitory nature of the polynucleotide synthesis in the cells. Studies have shown that non-replicating DNA sequences can be introduced into cells to provide production of the desired polypeptide for periods of up to six months.

[1049] The polynucleotide construct can be delivered to the interstitial space of tissues within an animal, including muscle, skin, brain, lung, liver, spleen, bone marrow, thymus, heart, lymph, blood, bone, cartilage, pancreas, kidney, gall bladder, stomach, intestine, testis, ovary, uterus, rectum, nervous system, eye, gland, and connective tissue. Interstitial space of the tissues comprises the intercellular fluid, mucopolysaccharide matrix among the reticular fibers of organ tissues, elastic fibers in the walls of vessels or chambers, collagen fibers of fibrous tissues, or that same matrix within connective tissue ensheathing muscle cells or in the lacunae of bone. It is similarly the space occupied by the plasma of the circulation and the lymph fluid of the lymphatic channels. Delivery to the interstitial space of muscle tissue is preferred for the reasons discussed below. They may be conveniently delivered by injection into the tissues comprising these cells. They are preferably delivered to and expressed in persistent, non-dividing cells which are differentiated, although delivery and expression may be achieved in non-differentiated or less completely differentiated cells, such as, for example, stem cells of blood or skin fibroblasts. In vivo muscle cells are particularly competent in their ability to take up and express polynucleotides.

[1050] For the naked polynucleotide injection, an effective dosage amount of DNA or RNA will be in the range of from about 0.05 g/kg body weight to about 50 mg/kg body weight. Preferably the dosage will be from about 0.005 mg/kg to about 20 mg/kg and more preferably from about 0.05 mg/kg to about 5 mg/kg. Of course, as the artisan of ordinary skill will appreciate, this dosage will vary according to the tissue site of injection. The appropriate and effective dosage of nucleic acid sequence can readily be determined by those of ordinary skill in the art and may depend on the condition being treated and the route of administration. The preferred route of administration is by the parenteral route of injection into the interstitial space of tissues. However, other parenteral routes may also be used, such as, inhalation of an aerosol formulation particularly for delivery to lungs or bronchial tissues, throat or mucous membranes of the nose. In addition, naked polynucleotide constructs can be delivered to arteries during angioplasty by the catheter used in the procedure.

[1051] The dose response effects of injected polynucleotide in muscle in vivo is determined as follows. Suitable template DNA for production of mRNA coding for polypeptide of the present invention is prepared in accordance with a standard recombinant DNA methodology. The template DNA, which may be either circular or linear, is either used as naked DNA or complexed with liposomes. The quadriceps muscles of mice are then injected with various amounts of the template DNA.

[1052] Five to six week old female and male Balb/C mice are anesthetized by intraperitoneal injection with 0.3 ml of 2.5% Avertin. A 1.5 cm incision is made on the anterior thigh, and the quadriceps muscle is directly visualized. The template DNA is injected in 0.1 ml of carrier in a 1 cc syringe through a 27 gauge needle over one minute, approximately 0.5 cm from the distal insertion site of the muscle into the knee and about 0.2 cm deep. A suture is placed over the injection site for future localization, and the skin is closed with stainless steel clips.

[1053] After an appropriate incubation time (e.g., 7 days) muscle extracts are prepared by excising the entire quadriceps. Every fifth 15 um cross-section of the individual quadriceps muscles is histochemically stained for protein expression. A time course for protein expression may be done in a similar fashion except that quadriceps from different mice are harvested at different times. Persistence of DNA in muscle following injection may be determined by Southern blot analysis after preparing total cellular DNA and HIRT supernatants from injected and control mice. The results of the above experimentation in mice can be used to extrapolate proper dosages and other treatment parameters in humans and other animals using naked DNA.

### Example 19

### Transgenic Animals

[1054] The polypeptides of the invention can also be expressed in transgenic animals. Animals of any species, including, but not limited to, mice, rats, rabbits, hamsters, guinea pigs, pigs, micro-pigs, goats, sheep, cows and non-human primates, e.g., baboons, monkeys, and chimpanzees may be used to generate transgenic animals. In a specific embodiment, techniques described herein or otherwise known in the art, are used to express polypeptides of the invention in humans, as part of a gene therapy protocol.

[1055] Any technique known in the art may be used to introduce the transgene (i.e., polynucleotides of the invention) into animals to produce the founder lines of transgenic animals. Such techniques include, but are not limited to, pronuclear microinjection (Paterson et al., Appl. Microbiol. Biotechnol. 40:691-698 (1994); Carver et al., Biotechnology (NY) 11:1263-1270 (1993); Wright et al., Biotechnology (NY) 9:830-834 (1991); and Hoppe et al., U.S. Pat. No. 4,873,191 (1989)); retrovirus mediated gene transfer into germ lines (Van der Putten et al., Proc. Natl. Acad. Sci., USA 82:6148-6152 (1985)), blastocysts or embryos; gene targeting in embryonic stem cells (Thompson et al., Cell 56:313-321 (1989)); electroporation of cells or embryos (Lo, 1983, Mol Cell. Biol. 3:1803-1814 (1983)); introduction of the polynucleotides of the invention using a gene gun (see, e.g., Ulmer et al., Science 259:1745 (1993); introducing nucleic acid constructs into embryonic pleuripotent stem cells and transferring the stem cells back into the blastocyst; and sperm-mediated gene transfer (Lavitrano et al., Cell 57:717-723 (1989); etc. For a review of such techniques, see Gordon, “Transgenic Animals,” Intl. Rev. Cytol. 115:171-229 (1989), which is incorporated by reference herein in its entirety.

[1056] Any technique known in the art may be used to produce transgenic clones containing polynucleotides of the invention, for example, nuclear transfer into enucleated oocytes of nuclei from cultured embryonic, fetal, or adult cells induced to quiescence (Campell et al., Nature 380:64-66 (1996); Wilmut et al., Nature 385:810-813 (1997)).

[1057] The present invention provides for transgenic animals that carry the transgene in all their cells, as well as animals which carry the transgene in some, but not all their cells, i.e., mosaic animals or chimeric. The transgene may be integrated as a single transgene or as multiple copies such as in concatamers, e.g., head-to-head tandems or head-to-tail tandems. The transgene may also be selectively introduced into and activated in a particular cell type by following, for example, the teaching of Lasko et al. (Lasko et al., Proc. Natl. Acad. Sci. USA 89:6232-6236 (1992)). The regulatory sequences required for such a cell-type specific activation will depend upon the particular cell type of interest, and will be apparent to those of skill in the art. When it is desired that the polynucleotide transgene be integrated into the chromosomal site of the endogenous gene, gene targeting is preferred. Briefly, when such a technique is to be utilized, vectors containing some nucleotide sequences homologous to the endogenous gene are designed for the purpose of integrating, via homologous recombination with chromosomal sequences, into and disrupting the function of the nucleotide sequence of the endogenous gene. The transgene may also be selectively introduced into a particular cell type, thus inactivating the endogenous gene in only that cell type, by following, for example, the teaching of Gu et al. (Gu et al., Science 265:103-106 (1994)). The regulatory sequences required for such a cell-type specific inactivation will depend upon the particular cell type of interest, and will be apparent to those of skill in the art.

[1058] Once transgenic animals have been generated, the expression of the recombinant gene may be assayed utilizing standard techniques. Initial screening may be accomplished by Southern blot analysis or PCR techniques to analyze animal tissues to verify that integration of the transgene has taken place. The level of mRNA expression of the transgene in the tissues of the transgenic animals may also be assessed using techniques which include, but are not limited to, Northern blot analysis of tissue samples obtained from the animal, in situ hybridization analysis, and reverse transcriptase-PCR (rt-PCR). Samples of transgenic gene-expressing tissue may also be evaluated immunocytochemically or immunohistochemically using antibodies specific for the transgene product.

[1059] Once the founder animals are produced, they may be bred, inbred, outbred, or crossbred to produce colonies of the particular animal. Examples of such breeding strategies include, but are not limited to: outbreeding of founder animals with more than one integration site in order to establish separate lines; inbreeding of separate lines in order to produce compound transgenics that express the transgene at higher levels because of the effects of additive expression of each transgene; crossing of heterozygous transgenic animals to produce animals homozygous for a given integration site in order to both augment expression and eliminate the need for screening of animals by DNA analysis; crossing of separate homozygous lines to produce compound heterozygous or homozygous lines; and breeding to place the transgene on a distinct background that is appropriate for an experimental model of interest.

[1060] Transgenic animals of the invention have uses which include, but are not limited to, animal model systems useful in elaborating the biological function of polypeptides of the present invention, studying conditions and/or disorders associated with aberrant expression, and in screening for compounds effective in ameliorating such conditions and/or disorders.

### Example 20

### Knock-Out Animals

[1061] Endogenous gene expression can also be reduced by inactivating or “knocking out” the gene and/or its promoter using targeted homologous recombination. (e.g., see Smithies et al., Nature 317:230-234 (1985); Thomas & Capecchi, Cell 51:503-512 (1987); Thompson et al., Cell 5:313-321 (1989); each of which is incorporated by reference herein in its entirety). For example, a mutant, non-functional polynucleotide of the invention (or a completely unrelated DNA sequence) flanked by DNA homologous to the endogenous polynucleotide sequence (either the coding regions or regulatory regions of the gene) can be used, with or without a selectable marker and/or a negative selectable marker, to transfect cells that express polypeptides of the invention in vivo. In another embodiment, techniques known in the art are used to generate knockouts in cells that contain, but do not express the gene of interest. Insertion of the DNA construct, via targeted homologous recombination, results in inactivation of the targeted gene. Such approaches are particularly suited in research and agricultural fields where modifications to embryonic stem cells can be used to generate animal offspring with an inactive targeted gene (e.g., see Thomas & Capecchi 1987 and Thompson 1989, supra). However this approach can be routinely adapted for use in humans provided the recombinant DNA constructs are directly administered or targeted to the required site in vivo using appropriate viral vectors that will be apparent to those of skill in the art.

[1062] In further embodiments of the invention, cells that are genetically engineered to express the polypeptides of the invention, or alternatively, that are genetically engineered not to express the polypeptides of the invention (e.g., knockouts) are administered to a patient in vivo. Such cells may be obtained from the patient (i.e., animal, including human) or an MHC compatible donor and can include, but are not limited to fibroblasts, bone marrow cells, blood cells (e.g., lymphocytes), adipocytes, muscle cells, endothelial cells etc. The cells are genetically engineered in vitro using recombinant DNA techniques to introduce the coding sequence of polypeptides of the invention into the cells, or alternatively, to disrupt the coding sequence and/or endogenous regulatory sequence associated with the polypeptides of the invention, e.g., by transduction (using viral vectors, and preferably vectors that integrate the transgene into the cell genome) or transfection procedures, including, but not limited to, the use of plasmids, cosmids, YACs, naked DNA, electroporation, liposomes, etc. The coding sequence of the polypeptides of the invention can be placed under the control of a strong constitutive or inducible promoter or promoter/enhancer to achieve expression, and preferably secretion, of the polypeptides of the invention. The engineered cells which express and preferably secrete the polypeptides of the invention can be introduced into the patient systemically, e.g., in the circulation, or intraperitoneally.

[1063] Alternatively, the cells can be incorporated into a matrix and implanted in the body, e.g., genetically engineered fibroblasts can be implanted as part of a skin graft; genetically engineered endothelial cells can be implanted as part of a lymphatic or vascular graft. (See, for example, Anderson et al. U.S. Pat. No. 5,399,349; and Mulligan & Wilson, U.S. Pat. No. 5,460,959 each of which is incorporated by reference herein in its entirety).

[1064] When the cells to be administered are non-autologous or non-MHC compatible cells, they can be administered using well known techniques which prevent the development of a host immune response against the introduced cells. For example, the cells may be introduced in an encapsulated form which, while allowing for an exchange of components with the immediate extracellular environment, does not allow the introduced cells to be recognized by the host immune system.

[1065] Transgenic and “knock-out” animals of the invention have uses which include, but are not limited to, animal model systems useful in elaborating the biological function of polypeptides of the present invention, studying conditions and/or disorders associated with aberrant expression, and in screening for compounds effective in ameliorating such conditions and/or disorders.

### Example 21

### Assays Detecting Stimulation or Inhibition of B Cell Proliferation and Differentiation

[1066] Generation of functional humoral immune responses requires both soluble and cognate signaling between B-lineage cells and their microenvironment. Signals may impart a positive stimulus that allows a B-lineage cell to continue its programmed development, or a negative stimulus that instructs the cell to arrest its current developmental pathway. To date, numerous stimulatory and inhibitory signals have been found to influence B cell responsiveness including IL-2, IL-4, IL-5, IL-6, IL-7, IL-10, IL-13, IL-14 and IL-15. Interestingly, these signals are by themselves weak effectors but can, in combination with various co-stimulatory proteins, induce activation, proliferation, differentiation, homing, tolerance and death among B cell populations.

[1067] One of the best studied classes of B-cell co-stimulatory proteins is the TNF-superfamily. Within this family CD40, CD27, and CD30 along with their respective ligands CD154, CD70, and CD153 have been found to regulate a variety of immune responses. Assays which allow for the detection and/or observation of the proliferation and differentiation of these B-cell populations and their precursors are valuable tools in determining the effects various proteins may have on these B-cell populations in terms of proliferation and differentiation. Listed below are two assays designed to allow for the detection of the differentiation, proliferation, or inhibition of B-cell populations and their precursors.

[1068] In Vitro Assay—Agonists or antagonists of the invention can be assessed for its ability to induce activation, proliferation, differentiation or inhibition and/or death in B-cell populations and their precursors. The activity of the agonists or antagonists of the invention on purified human tonsillar B cells, measured qualitatively over the dose range from 0.1 to 10,000 ng/mL, is assessed in a standard B-lymphocyte co-stimulation assay in which purified tonsillar B cells are cultured in the presence of either formalin-fixed Staphylococcus aureus Cowan I (SAC) or immobilized anti-human IgM antibody as the priming agent. Second signals such as IL-2 and IL-15 synergize with SAC and IgM crosslinking to elicit B cell proliferation as measured by tritiated-thymidine incorporation. Novel synergizing agents can be readily identified using this assay. The assay involves isolating human tonsillar B cells by magnetic bead (MACS) depletion of CD3-positive cells. The resulting cell population is greater than 95% B cells as assessed by expression of CD45R(B220).

[1069] Various dilutions of each sample are placed into individual wells of a 96-well plate to which are added 10⁵ B-cells suspended in culture medium (RPMI 1640 containing 10% FBS, 5×10⁻⁵M 2ME, 100 U/ml penicillin, 10 ug/ml streptomycin, and 10⁻⁵ dilution of SAC) in a total volume of 150 ul. Proliferation or inhibition is quantitated by a 20h pulse (1uCi/well) with 3H-thymidine (6.7 Ci/mM) beginning 72h post factor addition. The positive and negative controls are IL2 and medium respectively.

[1070] In vivo Assay—BALB/c mice are injected (i.p.) twice per day with buffer only, or 2 mg/Kg of agonists or antagonists of the invention, or truncated forms thereof. Mice receive this treatment for 4 consecutive days, at which time they are sacrificed and various tissues and serum collected for analyses. Comparison of H&E sections from normal spleens and spleens treated with agonists or antagonists of the invention identify the results of the activity of the agonists or antagonists on spleen cells, such as the diffusion of peri-arterial lymphatic sheaths, and/or significant increases in the nucleated cellularity of the red pulp regions, which may indicate the activation of the differentiation and proliferation of B-cell populations. Immunohistochemical studies using a B cell marker, anti-CD45R(B220), are used to determine whether any physiological changes to splenic cells, such as splenic disorganization, are due to increased B-cell representation within loosely defined B-cell zones that infiltrate established T-cell regions.

[1071] Flow cytometric analyses of the spleens from mice treated with agonist or antagonist is used to indicate whether the agonists or antagonists specifically increases the proportion of ThB+, CD45R(B220)dull B cells over that which is observed in control mice.

[1072] Likewise, a predicted consequence of increased mature B-cell representation in vivo is a relative increase in serum Ig titers. Accordingly, serum IgM and IgA levels are compared between buffer and agonists or antagonists-treated mice.

[1073] The studies described in this example tested activity of agonists or antagonists of the invention. However, one skilled in the art could easily modify the exemplified studies to test the activity of polynucleotides or polypeptides of the invention (e.g., gene therapy).

### Example 22

### T Cell Proliferation Assay

[1074] A CD3-induced proliferation assay is performed on PBMCs and is measured by the uptake of ³H-thvmidine. The assay is performed as follows. Ninety-six well plates are coated with 100 μl/well of mAb to CD3 (HIT3a, Pharmingen) or isotype-matched control mAb (B33.1) overnight at 4 degrees C (1 μg/ml in 0.05M bicarbonate buffer, pH 9.5), then washed three times with PBS. PBMC are isolated by F/H gradient centrifugation from human peripheral blood and added to quadruplicate wells (5×10⁴/well) of mAb coated plates in RPMI containing 10% FCS and P/S in the presence of varying concentrations of agonists or antagonists of the invention (total volume 200 ul). Relevant protein buffer and medium alone are controls. After 48 hr. culture at 37 degrees C, plates are spun for 2 min. at 1000 rpm and 100 μl of supernatant is removed and stored −20 degrees C for measurement of IL-2 (or other cytokines), if effect on proliferation is observed. Wells are supplemented with 100 μl of medium containing 0.5 uCi of ³H-thymidine and cultured at 37 degrees C for 18-24 hr. Wells are harvested and incorporation of ³H-thymidine used as a measure of proliferation. Anti-CD3 alone is the positive control for proliferation. IL-2 (100 U/ml) is also used as a control which enhances proliferation. Control antibody which does not induce proliferation of T cells is used as the negative control for the effects of agonists or antagonists of the invention.

[1075] The studies described in this example tested activity of agonists or antagonists of the invention. However, one skilled in the art could easily modify the exemplified studies to test the activity of polynucleotides or polypeptides of the invention (e.g., gene therapy).

### Example 23

### Effect of Agonists or Antagonists of the Invention on the Expression of MHC Class II, Costimulatory and Adhesion Molecules and Cell Differentiation of Monocytes and Monocyte-Derived Human Dendritic Cells

[1076] Dendritic cells are generated by the expansion of proliferating precursors found in the peripheral blood: adherent PBMC or elutriated monocytic fractions are cultured for 7-10 days with GM-CSF (50 ng/ml) and IL-4 (20 ng/ml). These dendritic cells have the characteristic phenotype of immature cells (expression of CD1, CD80, CD86, CD40 and MHC class II antigens). Treatment with activating factors, such as TNF-α, causes a rapid change in surface phenotype (increased expression of MHC class I and II, costimulatory and adhesion molecules, downregulation of FCγRII, upregulation of CD83). These changes correlate with increased antigen-presenting capacity and with functional maturation of the dendritic cells.

[1077] FACS analysis of surface antigens is performed as follows. Cells are treated 1-3 days with increasing concentrations of agonist or antagonist of the invention or LPS (positive control), washed with PBS containing 1% BSA and 0.02 mM sodium azide, and then incubated with 1:20 dilution of appropriate FITC- or PE-labeled monoclonal antibodies for 30 minutes at 4 degrees C. After an additional wash, the labeled cells are analyzed by flow cytometry on a FACScan (Becton Dickinson).

[1078] Effect on the Production of Cytokines.

[1079] Cytokines generated by dendritic cells, in particular IL-12, are important in the initiation of T-cell dependent immune responses. IL-12 strongly influences the development of Thl helper T-cell immune response, and induces cytotoxic T and NK cell function. An ELISA is used to measure the IL-12 release as follows. Dendritic cells (10⁶/ml) are treated with increasing concentrations of agonists or antagonists of the invention for 24 hours. LPS (100 ng/ml) is added to the cell culture as positive control. Supernatants from the cell cultures are then collected and analyzed for IL-12 content using commercial ELISA kit (e.g., R & D Systems (Minneapolis, Minn.)). The standard protocols provided with the kits are used.

[1080] Effect on the Expression of MHC Class II, Costimulatory and Adhesion Molecules.

[1081] Three major families of cell surface antigens can be identified on monocytes: adhesion molecules, molecules involved in antigen presentation, and Fc receptor. Modulation of the expression of MHC class II antigens and other costimulatory molecules, such as B7 and ICAM-1, may result in changes in the antigen presenting capacity of monocytes and ability to induce T cell activation. Increased expression of Fc receptors may correlate with improved monocyte cytotoxic activity, cytokine release and phagocytosis.

[1082] FACS analysis is used to examine the surface antigens as follows. Monocytes are treated 1-5 days with increasing concentrations of agonists or antagonists of the invention or LPS (positive control), washed with PBS containing 1% BSA and 0.02 mM sodium azide, and then incubated with 1:20 dilution of appropriate FITC- or PE-labeled monoclonal antibodies for 30 minutes at 4 degrees C. After an additional wash, the labeled cells are analyzed by flow cytometry on a FACScan (Becton Dickinson).

[1083] Monocyte Activation and/or Increased Survival.

[1084] Assays for molecules that activate (or alternatively, inactivate) monocytes and/or increase monocyte survival (or alternatively, decrease monocyte survival) are known in the art and may routinely be applied to determine whether a molecule of the invention functions as an inhibitor or activator of monocytes. Agonists or antagonists of the invention can be screened using the three assays described below. For each of these assays, Peripheral blood mononuclear cells (PBMC) are purified from single donor leukopacks (American Red Cross, Baltimore, Md.) by centrifugation through a Histopaque gradient (Sigma). Monocytes are isolated from PBMC by counterflow centrifugal elutriation.

[1085] Monocyte Survival Assay.

[1086] Human peripheral blood monocytes progressively lose viability when cultured in absence of serum or other stimuli. Their death results from internally regulated processes (apoptosis). Addition to the culture of activating factors, such as TNF-alpha dramatically improves cell survival and prevents DNA fragmentation. Propidium iodide (PI) staining is used to measure apoptosis as follows. Monocytes are cultured for 48 hours in polypropylene tubes in serum-free medium (positive control), in the presence of 100 ng/ml TNF-alpha (negative control), and in the presence of varying concentrations of the compound to be tested. Cells are suspended at a concentration of 2×10⁶/ml in PBS containing PI at a final concentration of 5 μg/ml, and then incubated at room temperature for 5 minutes before FACScan analysis. PI uptake has been demonstrated to correlate with DNA fragmentation in this experimental paradigm.

[1087] Effect on Cytokine Release.

[1088] An important function of monocytes/macrophages is their regulatory activity on other cellular populations of the immune system through the release of cytokines after stimulation. An ELISA to measure cytokine release is performed as follows. Human monocytes are incubated at a density of 5×10⁵ celis/ml with increasing concentrations of agonists or antagonists of the invention and under the same conditions, but in the absence of agonists or antagonists. For IL-12 production, the cells are primed overnight with IFN (100 U/ml) in the presence of agonist or antagonist of the invention. LPS (10 ng/ml) is then added. Conditioned media are collected after 24h and kept frozen until use. Measurement of TNF-alpha, IL-10, MCP-1 and IL-8 is then performed using a commercially available ELISA kit (e.g., R & D Systems (Minneapolis, Minn.)) and applying the standard protocols provided with the kit.

[1089] Oxidative Burst.

[1090] Purified monocytes are plated in 96-w plate at 2-1×10⁵ cell/well. Increasing concentrations of agonists or antagonists of the invention are added to the wells in a total volume of 0.2 ml culture medium (RPMI 1640+10% FCS, glutamine and antibiotics). After 3 days incubation, the plates are centrifuged and the medium is removed from the wells. To the macrophage monolayers, 0.2 ml per well of phenol red solution (140 mM NaCl, 10 mM potassium phosphate buffer pH 7.0, 5.5 mM dextrose, 0.56 mM phenol red and 19 U/ml of HRPO) is added, together with the stimulant (200 nM PMA). The plates are incubated at 37° C. for 2 hours and the reaction is stopped by adding 20 μl 1N NaOH per well. The absorbance is read at 610 nm. To calculate the amount of H₂O₂ produced by the macrophages, a standard curve of a H₂O₂ solution of known molarity is performed for each experiment.

[1091] The studies described in this example tested activity of agonists or antagonists of the invention. However, one skilled in the art could easily modify the exemplified studies to test the activity of polynucleotides or polypeptides of the invention (e.g., gene therapy).

### Example 24

### Biological Effects of Agonists or Antagonists of the Invention

[1092] Astrocyte and Neuronal Assays

[1093] Agonists or antagonists of the invention, expressed in Escherichia coli and purified as described above, can be tested for activity in promoting the survival, neurite outgrowth, or phenotypic differentiation of cortical neuronal cells and for inducing the proliferation of glial fibrillary acidic protein immunopositive cells, astrocytes. The selection of cortical cells for the bioassay is based on the prevalent expression of FGF-1 and FGF-2 in cortical structures and on the previously reported enhancement of cortical neuronal survival resulting from FGF-2 treatment. A thymidine incorporation assay, for example, can be used to elucidate an agonist or antagonist of the invention's activity on these cells.

[1094] Moreover, previous reports describing the biological effects of FGF-2 (basic FGF) on cortical or hippocampal neurons in vitro have demonstrated increases in both neuron survival and neurite outgrowth (Walicke et al., “Fibroblast growth factor promotes survival of dissociated hippocampal neurons and enhances neurite extension.” Proc. Natl. Acad. Sci. USA 83:3012-3016. (1986), assay herein incorporated by reference in its entirety). However, reports from experiments done on PC-12 cells suggest that these two responses are not necessarily synonymous and may depend on not only which FGF is being tested but also on which receptor(s) are expressed on the target cells. Using the primary cortical neuronal culture paradigm, the ability of an agonist or antagonist of the invention to induce neurite outgrowth can be compared to the response achieved with FGF-2 using, for example, a thymidine incorporation assay.

[1095] Fibroblast and Endothelial Cell Assays

[1096] Human lung fibroblasts are obtained from Clonetics (San Diego, Calif.) and maintained in growth media from Clonetics. Dermal microvascular endothelial cells are obtained from Cell Applications (San Diego, Calif.). For proliferation assays, the human lung fibroblasts and dermal microvascular endothelial cells can be cultured at 5,000 cells/well in a 96-well plate for one day in growth medium. The cells are then incubated for one day in 0.1% BSA basal medium. After replacing the medium with fresh 0.1% BSA medium, the cells are incubated with the test proteins for 3 days. Alamar Blue (Alamar Biosciences, Sacramento, Calif.) is added to each well to a final concentration of 10%. The cells are incubated for 4 hr. Cell viability is measured by reading in a CytoFluor fluorescence reader. For the PGE₂ assays, the human lung fibroblasts are cultured at 5,000 cells/well in a 96-well plate for one day. After a medium change to 0.1% BSA basal medium, the cells are incubated with FGF-2 or agonists or antagonists of the invention with or without IL-1α for 24 hours. The supernatants are collected and assayed for PGE₂ by EIA kit (Cayman, Ann Arbor, Mich.). For the IL-6 assays, the human lung fibroblasts are cultured at-5,000 cells/well in a 96-well plate for one day. After a medium change to 0.1% BSA basal medium, the cells are incubated with FGF-2 or with or without agonists or antagonists of the invention IL-1α for 24 hours. The supernatants are collected and assayed for IL-6 by ELISA kit (Endogen, Cambridge, Mass.).

[1097] Human lung fibroblasts are cultured with FGF-2 or agonists or antagonists of the invention for 3 days in basal medium before the addition of Alamar Blue to assess effects on growth of the fibroblasts. FGF-2 should show a stimulation at 10-2500 ng/ml which can be used to compare stimulation with agonists or antagonists of the invention.

[1098] Parkinson Models.

[1099] The loss of motor function in Parkinson's disease is attributed to a deficiency of striatal dopamine resulting from the degeneration of the nigrostriatal dopaminergic projection neurons. An animal model for Parkinson's that has been extensively characterized involves the systemic administration of 1-methyl-4 phenyl 1,2,3,6-tetrahydropyridine (MPTP). In the CNS, MPTP is taken-up by astrocytes and catabolized by monoamine oxidase B to 1-methyl-4-phenyl pyridine (MPP⁺) and released. Subsequently, MPP⁺ is actively accumulated in dopaminergic neurons by the high-affinity reuptake transporter for dopamine. MPP⁺ is then concentrated in mitochondria by the electrochemical gradient and selectively inhibits nicotidamide adenine disphosphate: ubiquinone oxidoreductionase (complex I), thereby interfering with electron transport and eventually generating oxygen radicals.

[1100] It has been demonstrated in tissue culture paradigms that FGF-2 (basic FGF) has trophic activity towards nigral dopaminergic neurons (Ferrari et al., Dev. Biol. 1989). Recently, Dr. Unsicker's group has demonstrated that administering FGF-2 in gel foam implants in the striatum results in the near complete protection of nigral dopaminergic neurons from the toxicity associated with MPTP exposure (Otto and Unsicker, J. Neuroscience, 1990).

[1101] Based on the data with FGF-2, agonists or antagonists of the invention can be evaluated to determine whether it has an action similar to that of FGF-2 in enhancing dopaminergic neuronal survival in vitro and it can also be tested in vivo for protection of dopaminergic neurons in the striatum from the damage associated with MPTP treatment. The potential effect of an agonist or antagonist of the invention is first examined in vitro in a dopaminergic neuronal cell culture paradigm. The cultures are prepared by dissecting the midbrain floor plate from gestation day 14 Wistar rat embryos. The tissue is dissociated with trypsin and seeded at a density of 200,000 cells/cm² on polyorthinine-laminin coated glass coverslips. The cells are maintained in Dulbecco's Modified Eagle's medium and F12 medium containing hormonal supplements (N1). The cultures are fixed with paraforrnaldehyde after 8 days in vitro and are processed for tyrosine hydroxylase, a specific marker for dopaminergic neurons, immunohistochemical staining. Dissociated cell cultures are prepared from embryonic rats. The culture medium is changed every third day and the factors are also added at that time.

[1102] Since the dopaminergic neurons are isolated from animals at gestation day 14, a developmental time which is past the stage when the dopaminergic precursor cells are proliferating, an increase in the number of tyrosine hydroxylase immunopositive neurons would represent an increase in the number of dopaminergic neurons surviving in vitro. Therefore, if an agonist or antagonist of the invention acts to prolong the survival of dopaminergic neurons, it would suggest that the agonist or antagonist may be involved in Parkinson's Disease.

[1103] The studies described in this example tested activity of agonists or antagonists of the invention. However, one skilled in the art could easily modify the exemiplified studies to test the activity of polynucleotides or polypeptides of the invention (e.g., gene therapy).

### Example 25

### The Effect of Agonists or Antagonists of the Invention on the Growth of Vascular Endothelial Cells

[1104] On day 1, human umbilical vein endothelial cells (HUVEC) are seeded at 2-5×10⁴ cells/35 mm dish density in M199 medium containing 4% fetal bovine serum (FBS), 16 units/ml heparin, and 50 units/ml endothelial cell growth supplements (ECGS, Biotechnique, Inc.). On day 2, the medium is replaced with M199 containing 10% FBS, 8 units/ml heparin. An agonist or antagonist of the invention, and positive controls, such as VEGF and basic FGF (bFGF) are added, at varying concentrations. On days 4 and 6, the medium is replaced. On day 8, cell number is determined with a Coulter Counter.

[1105] An increase in the number of HUVEC cells indicates that the compound of the invention may proliferate vascular endothelial cells, while a decrease in the number of HUVEC cells indicates that the compound of the invention inhibits vascular endothelial cells.

[1106] The studies described in this example tested activity of a polypeptide of the invention. However, one skilled in the art could easily modify the exemplified studies to test the activity of polynucleotides (e.g., gene therapy), agonists, and/or antagonists of the invention.

### Example 26

### Rat Corneal Wound Healing Model

[1107] This animal model shows the effect of an agonist or antagonist of the invention on neovascularization. The experimental protocol includes:

[1108] a) Making a 1-1.5 mm long incision from the center of cornea into the stromal layer.

[1109] b) Inserting a spatula below the lip of the incision facing the outer corner of the eye.

[1110] c) Making a pocket (its base is 1-1.5 mm form the edge of the eye).

[1111] d) Positioning a pellet, containing 50 ng-5 ug of an agonist or antagonist of the invention, within the pocket.

[1112] e) Treatment with an agonist or antagonist of the invention can also be applied topically to the comeal wounds in a dosage range of 20mg-500mg (daily treatment for five days).

[1113] The studies described in this example tested activity of agonists or antagonists of the invention. However, one skilled in the art could easily modify the exemplified studies to test the activity of polynucleotides or polypeptides of the invention (e.g., gene therapy).

### Example 27

### Diabetic Mouse and Glucocorticoid-Impaired Wound Healing Models

[1114] Diabetic db+/db+ Mouse Model.

[1115] To demonstrate that an agonist or antagonist of the invention accelerates the healing process, the genetically diabetic mouse model of wound healing is used. The full thickness wound healing model in the db+/db+ mouse is a well characterized, clinically relevant and reproducible model of impaired wound healing. Healing of the diabetic wound is dependent on formation of granulation tissue and re-epithelialization rather than contraction (Gartner, M. H. et al., J. Surg. Res. 52:389 (1992); Greenhalgh, D. G. et al., Am. J. Pathol. 136:1235 (1990)).

[1116] The diabetic animals have many of the characteristic features observed in Type II diabetes mellitus. Homozygous (db+/db+) mice are obese in comparison to their normal heterozygous (db+/+m) littermates. Mutant diabetic (db+/db+) mice have a single autosomal recessive mutation on chromosome 4 (db+) (Coleman et al. Proc. Natl. Acad. Sci. USA 77:283-293 (1982)). Animals show potyphagia, polydipsia and polyuria. Mutant diabetic mice (db+/db+) have elevated blood glucose, increased or normal insulin levels, and suppressed cell-mediated immunity (Mandel et al., J. Immunol. 120:1375 (1978); Debray-Sachs, M. et al., Clin. Exp. Immunol. 51(1):1-7 (1983); Leiter et al., Am. J. of Pathol. 114:46-55 (1985)). Peripheral neuropathy, myocardial complications, and microvascular lesions, basement membrane thickening and glomerular filtration abnormalities have been described in these animals (Norido, F. et al., Exp. Neurol. 83(2):221-232 (1984); Robertson et al., Diabetes 29(1):60-67 (1980); Giacomelli et al., Lab Invest. 40(4):460-473 (1979); Coleman, D. L., Diabetes 31 (Suppl):1-6 (1982)). These homozygous diabetic mice develop hyperglycemia that is resistant to insulin analogous to human type II diabetes (Mandel et al., J. Immunol. 120:1375-1377 (1978)).

[1117] The characteristics observed in these animals suggests that healing in this model may be similar to the healing observed in human diabetes (Greenhalgh, et al., Am. J. of Pathol. 136:1235-1246 (1990)).

[1118] Genetically diabetic female C57BL/KsJ (db+/db+) mice and their non-diabetic (db+/+m) heterozygous littermates are used in this study (Jackson Laboratories). The animals are purchased at 6 weeks of age and are 8 weeks old at the beginning of the study. Animals are individually housed and received food and water ad libitum. All manipulations are performed using aseptic techniques. The experiments are conducted according to the rules and guidelines of Human Genome Sciences, Inc. Institutional Animal Care and Use Committee and the Guidelines for the Care and Use of Laboratory Animals.

[1119] Wounding protocol is performed according to previously reported methods (Tsuboi, R. and Rifkin, D. B., J. Exp. Med. 172:245-251 (1990)). Briefly, on the day of wounding, animals are anesthetized with an intraperitoneal injection of Avertin (0.01 mg/mL), 2,2,2-tribromoethanol and 2-methyl-2-butanol dissolved in deionized water. The dorsal region of the animal is shaved and the skin washed with 70% ethanol solution and iodine. The surgical area is dried with sterile gauze prior to wounding. An 8 mm full-thickness wound is then created using a Keyes tissue punch. Immediately following wounding, the surrounding skin is gently stretched to eliminate wound expansion. The wounds are left open for the duration of the experiment. Application of the treatment is given topically for 5 consecutive days commencing on the day of wounding. Prior to treatment, wounds are gently cleansed with sterile saline and gauze sponges.

[1120] Wounds are visually examined and photographed at a fixed distance at the day of surgery and at two day intervals thereafter. Wound closure is determined by daily measurement on days 1-5 and on day 8. Wounds are measured horizontally and vertically using a calibrated Jameson caliper. Wounds are considered healed if granulation tissue is no longer visible and the wound is covered by a continuous epithelium.

[1121] An agonist or antagonist of the invention is administered using at a range different doses, from 4mg to 500mg per wound per day for 8 days in vehicle. Vehicle control groups received 50 mL of vehicle solution.

[1122] Animals are euthanized on day 8 with an intraperitoneal injection of sodium pentobarbital (300 mg/kg). The wounds and surrounding skin are then harvested for histology and immunohistochemistry. Tissue specimens are placed in 10% neutral buffered formalin in tissue cassettes between biopsy sponges for further processing.

[1123] Three groups of 10 animals each (5 diabetic and 5 non-diabetic controls) are evaluated: 1) Vehicle placebo control, 2) untreated group, and 3) treated group.

[1124] Wound closure is analyzed by measuring the area in the vertical and horizontal axis and obtaining the total square area of the wound. Contraction is then estimated by establishing the differences between the initial wound area (day 0) and that of post treatment (day 8). The wound area on day 1 is 64 mm², the corresponding size of the dermal punch. Calculations are made using the following formula:

[Open area on day 8]−[Open area on day 1]/[Open area on day 1]

[1125] Specimens are fixed in 10% buffered formalin and paraffin embedded blocks are sectioned perpendicular to the wound surface (5 mm) and cut using a Reichert-Jung microtome. Routine hematoxylin-eosin (H&E) staining is performed on cross-sections of bisected wounds. Histologic examination of the wounds are used to assess whether the healing process and the morphologic appearance of the repaired skin is altered by treatment with an agonist or antagonist of the invention. This assessment included verification of the presence of cell accumulation, inflammatory cells, capillaries, fibroblasts, re-epithelialization and epidermal maturity (Greenhalgh, D. G. et al., Am. J. Pathol. 136.1235 (1990)). A calibrated lens micrometer is used by a blinded observer.

[1126] Tissue sections are also stained immunohistochemically with a polyclonal rabbit anti-human keratin antibody using ABC Elite detection system. Human skin is used as a positive tissue control while non-immune IgG is used as a negative control. Keratinocyte growth is determined by evaluating the extent of reepithelialization of the wound using a calibrated lens micrometer.

[1127] Proliferating cell nuclear antigen/cyclin (PCNA) in skin specimens is demonstrated by using anti-PCNA antibody (1:50) with an ABC Elite detection system. Human colon cancer served as a positive tissue control and human brain tissue is used as a negative tissue control. Each specimen included a section with omission of the primary antibody and substitution with non-immune mouse IgG. Ranking of these sections is based on the extent of proliferation on a scale of 0-8, the lower side of the scale reflecting slight proliferation to the higher side reflecting intense proliferation.

[1128] Experimental data are analyzed using an unpaired t test. A p value of <0.05 is considered significant.

[1129] Steroid Impaired Rat Model

[1130] The inhibition of wound healing by steroids has been well documented in various in vitro and in vivo systems (Wahl, Glucocorticoids and Wound healing. In: Anti-Inflammatory Steroid Action: Basic and Clinical Aspects. 280-302 (1989); Wahlet al., J. Immunol. 115: 476-481 (1975); Werb et al., J. Exp. Med. 147:1684-1694 (1978)). Glucocorticoids retard wound healing by inhibiting angiogenesis, decreasing vascular permeability (Ebert et al., An. Intern. Med. 37:701-705 (1952)), fibroblast proliferation, and collagen synthesis (Beck et al., Growth Factors. 5: 295-304 (1991); Haynes et al., J. Clin. Invest. 61: 703-797 (1978)) and producing a transient reduction of circulating monocytes (Haynes et al., J. Clin. Invest. 61: 703-797 (1978); Wahl, “Glucocorticoids and wound healing”, In: Antiinflammatory Steroid Action: Basic and Clinical Aspects, Academic Press, New York, pp. 280-302 (1989)). The systemic administration of steroids to impaired wound healing is a well establish phenomenon in rats (Beck et al., Growth Factors. 5: 295-304 (1991); Haynes et al., J. Clin. Invest. 61: 703-797 (1978); Wahl, “Glucocorticoids and wound healing”, In: Antiinflammatory Steroid Action: Basic and Clinical Aspects, Academic Press, New York, pp. 280-302 (1989); Pierce et al., Proc. Natl. Acad. Sci. USA 86: 2229-2233 (1989)).

[1131] To demonstrate that an agonist or antagonist of the invention can accelerate the healing process, the effects of multiple topical applications of the agonist or antagonist on full thickness excisional skin wounds in rats in which healing has been impaired by the systemic administration of methylprednisolone is assessed.

[1132] Young adult male Sprague Dawley rats weighing 250-300 g (Charles River Laboratories) are used in this example. The animals are purchased at 8 weeks of age and are 9 weeks old at the beginning of the study. The healing response of rats is impaired by the systemic administration of methylprednisolone (17mg/kg/rat intramuscularly) at the time of wounding. Animals are individually housed and received food and water ad libitum. All manipulations are performed using aseptic techniques. This study is conducted according to the rules and guidelines of Human Genome Sciences, Inc. Institutional Animal Care and Use Committee and the Guidelines for the Care and Use of Laboratory Animals.

[1133] The wounding protocol is followed according to section A, above. On the day of wounding, animals are anesthetized with an intramuscular injection of ketamine (50 mg/kg) and xylazine (5 mg/kg). The dorsal region of the animal is shaved and the skin washed with 70% ethanol and iodine solutions. The surgical area is dried with sterile gauze prior to wounding. An 8 mm full-thickness wound is created using a Keyes tissue punch. The wounds are left open for the duration of the experiment. Applications of the testing materials are given topically once a day for 7 consecutive days commencing on the day of wounding and subsequent to methylprednisolone administration. Prior to treatment, wounds are gently cleansed with sterile saline and gauze sponges.

[1134] Wounds are visually examined and photographed at a fixed distance at the day of wounding and at the end of treatment. Wound closure is determined by daily measurement on days 1-5 and on day 8. Wounds are measured horizontally and vertically using a calibrated Jameson caliper. Wounds are considered healed if granulation tissue is no longer visible and the wound is covered by a continuous epithelium.

[1135] The agonist or antagonist of the invention is administered using at a range different doses, from 4 mg to 500 mg per wound per day for 8 days in vehicle. Vehicle control groups received 50 mL of vehicle solution.

[1136] Animals are euthanized on day 8 with an intraperitoneal injection of sodium pentobarbital (300 mg/kg). The wounds and surrounding skin are then harvested for histology. Tissue specimens are placed in 10% neutral buffered formalin in tissue cassettes between biopsy sponges for further processing

[1137] Three groups of 10 animals each (5 with methylprednisolone and 5 without glucocorticoid) are evaluated: 1) Untreated group 2) Vehicle placebo control 3) treated groups.

[1138] Wound closure is analyzed by measuring the area in the vertical and horizontal axis and obtaining the total area of the wound. Closure is then estimated by establishing the differences between the initial wound area (day 0) and that of post treatment (day 8). The wound area on day 1 is 64 mm², the corresponding size of the dermal punch. Calculations are made using the following formula:

[Open area on day 8]−[Open area on day 1]/[Open area on day 1]

[1139] Specimens are fixed in 10% buffered formalin and paraffin embedded blocks are sectioned perpendicular to the wound surface (5 mm) and cut using an Olympus microtome. Routine hematoxylin-eosin (H&E) staining is performed on cross-sections of bisected wounds. Histologic examination of the wounds allows assessment of whether the healing process and the morphologic appearance of the repaired skin is improved by treatment with an agonist or antagonist of the invention. A calibrated lens micrometer is used by a blinded observer to determine the distance of the wound gap.

[1140] Experimental data are analyzed using an unpaired t test. A p value of <0.05 is considered significant.

[1141] The studies described in this example tested activity of agonists or antagonists of the invention. However, one skilled in the art could easily modify the exemplified studies to test the activity of polynucleotides or polypeptides of the invention (e.g., gene therapy).

### Example 28

### Lymphadema Animal Model

[1142] The purpose of this experimental approach is to create an appropriate and consistent lymphedema model for testing the therapeutic effects of an agonist or antagonist of the invention in lymphangiogenesis and re-establishment of the lymphatic circulatory system in the rat hind limb. Effectiveness is measured by swelling volume of the affected limb, quantification of the amount of lymphatic vasculature, total blood plasma protein, and histopathology. Acute lymphedema is observed for 7-10 days. Perhaps more importantly, the chronic progress of the edema is followed for up to 3-4 weeks.

[1143] Prior to beginning surgery, blood sample is drawn for protein concentration analysis. Male rats weighing approximately ˜350 g are dosed with Pentobarbital. Subsequently, the right legs are shaved from knee to hip. The shaved area is swabbed with gauze soaked in 70% EtOH. Blood is drawn for serum total protein testing. Circumference and volumetric measurements are made prior to injecting dye into paws after marking 2 measurement levels (0.5 cm above heel, at mid-pt of dorsal paw). The intradermal dorsum of both right and left paws are injected with 0.05 ml of 1% Evan's Blue. Circumference and volumetric measurements are then made following injection of dye into paws.

[1144] Using the knee joint as a landmark, a mid-leg inguinal incision is made circumferentially allowing the femoral vessels to be located. Forceps and hemostats are used to dissect and separate the skin flaps. After locating the femoral vessels, the lymphatic vessel that runs along side and underneath the vessel(s) is located. The main lymphatic vessels in this area are then electrically coagulated or suture ligated.

[1145] Using a microscope, muscles in back of the leg (near the semitendinosis and adductors) are bluntly dissected. The popliteal lymph node is then located. The 2 proximal and 2 distal lymphatic vessels and distal blood supply of the popliteal node are then ligated by suturing. The popliteal lymph node, and any accompanying adipose tissue, is then removed by cutting connective tissues.

[1146] Care is taken to control any mild bleeding resulting from this procedure. After lymphatics are occluded, the skin flaps are sealed by using liquid skin (Vetbond) (A J Buck). The separated skin edges are sealed to the underlying muscle tissue while leaving a gap of ˜0.5 cm around the leg. Skin also may be anchored by suturing to underlying muscle when necessary.

[1147] To avoid infection, animals are housed individually with mesh (no bedding). Recovering animals are checked daily through the optimal edematous peak, which typically occurred by day 5-7. The plateau edematous peak are then observed. To evaluate the intensity of the lymphedema, the circumference and volumes of 2 designated places on each paw before operation and daily for 7 days are measured. The effect of plasma proteins on lymphedema is determined and whether protein analysis is a useful testing perimeter is also investigated. The weights of both control and edematous limbs are evaluated at 2 places. Analysis is performed in a blind manner.

[1148] Circumference Measurements:

[1149] Under brief gas anesthetic to prevent limb movement, a cloth tape is used to measure limb circumference. Measurements are done at the ankle bone and dorsal paw by 2 different people and those 2 readings are averaged. Readings are taken from both control and edematous limbs.

[1150] Volumetric Measurements:

[1151] On the day of surgery, animals are anesthetized with Pentobarbital and are tested prior to surgery. For daily volumetrics animals are under brief halothane anesthetic (rapid immobilization and quick recovery), and both legs are shaved and equally marked using waterproof marker on legs. Legs are first dipped in water, then dipped into instrument to each marked level then measured by Buxco edema software(Chen/Victor). Data is recorded by one person, while the other is dipping the limb to marked area.

[1152] Blood-Plasma Protein Measurements:

[1153] Blood is drawn, spun, and serum separated prior to surgery and then at conclusion for total protein and Ca2⁺ comparison.

[1154] Limb Weight Comparison:

[1155] After drawing blood, the animal is prepared for tissue collection. The limbs are amputated using a quillitine, then both experimental and control legs are cut at the ligature and weighed. A second weighing is done as the tibio-cacaneal joint is disarticulated and the foot is weighed.

[1156] Histological Preparations:

[1157] The transverse muscle located behind the knee (popliteal) area is dissected and arranged in a metal mold, filled with freezeGel, dipped into cold methylbutane, placed into labeled sample bags at −80EC until sectioning. Upon sectioning, the muscle is observed under fluorescent microscopy for lymphatics.

[1158] The studies described in this example tested activity of agonists or antagonists of the invention. However, one skilled in the art could easily modify the exemplified studies to test the activity of polynucleotides or polypeptides of the invention (e.g., gene therapy).

### Example 29

### Suppression of TNF Alpha-Induced Adhesion Molecule Expression by an Agonist or Antagonist of the Invention

[1159] The recruitment of lymphocytes to areas of inflammation and angiogenesis involves specific receptor-ligand interactions between cell surface adhesion molecules (CAMs) on lymphocytes and the vascular endothelium. The adhesion process, in both normal and pathological settings, follows a multi-step cascade that involves intercellular adhesion molecule-1 (ICAM-1), vascular cell adhesion molecule-1 (VCAM-1), and endothelial leukocyte adhesion molecule-1 (E-selectin) expression on endothelial cells (EC). The expression of these molecules and others on the vascular endothelium determines the efficiency with which leukocytes may adhere to the local vasculature and extravasate into the local tissue during the development of an inflammatory response. The local concentration of cytokines and growth factor participate in the modulation of the expression of these CAMs.

[1160] Tumor necrosis factor alpha (TNF-a), a potent proinflammatory cytokine, is a stimulator of all three CAMs on endothelial cells and may be involved in a wide variety of inflammatory responses, often resulting in a pathological outcome.

[1161] The potential of an agonist or antagonist of the invention to mediate a suppression of TNF-a induced CAM expression can be examined. A modified ELISA assay which uses ECs as a solid phase absorbent is employed to measure the amount of CAM expression on TNF-a treated ECs when co-stimulated with a member of the FGF family of proteins.

[1162] To perform the experiment, human umbilical vein endothelial cell (HUVEC) cultures are obtained from pooled cord harvests and maintained in growth medium (EGM-2; Clonetics, San Diego, Calif.) supplemented with 10% FCS and 1% penicillin/streptomycin in a 37 degree C humidified incubator containing 5% CO₂. HUVECs are seeded in 96-well plates at concentrations of 1×10⁴ cells/well in EGM medium at 37 degree C for 18-24 hrs or until confluent. The monolayers are subsequently washed 3 times with a serum-free solution of RPMI-1640 supplemented with 100 U/ml penicillin and 100 mg/ml streptomycin, and treated with a given cytokine and/or growth factor(s) for 24 h at 37 degree C. Following incubation, the cells are then evaluated for CAM expression.

[1163] Human Umbilical Vein Endothelial cells (HUVECS) are grown in a standard 96 well plate to confluence. Growth medium is removed from the cells and replaced with 90 ul of 199 Medium (10% FBS). Samples for testing, and positive or negative controls are added to the plate in triplicate (in 10 ul volumes). Plates are incubated at 37 degree C for either 5 h (selectin and integrin expression) or 24 h (integrin expression only). Plates are aspirated to remove medium and 100 μl of 0.1% paraformaldehyde-PBS(with Ca++ and Mg++) is added to each well. Plates are held at 4° C. for 30 min.

[1164] Fixative is then removed from the wells and wells are washed 1× with PBS(+Ca,Mg)+0.5% BSA and drained. Do not allow the wells to dry. Add 10 μl of diluted primary antibody to the test and control wells. Anti-ICAM-1-Biotin, Anti-VCAM-1-Biotin and Anti-E-selectin-Biotin are used at a concentration of 10 μg/ml (1:10 dilution of 0.1 mg/ml stock antibody). Cells are incubated at 37° C. for 30 min. in a humidified environment. Wells are washed X3 with PBS(+Ca,Mg)+0.5% BSA.

[1165] Then add 20 μl of diluted ExtrAvidin-Alkaline Phosphotase (1:5,000 dilution) to each well and incubated at 37° C. for 30 min. Wells are washed X3 with PBS(+Ca,Mg)+0.5% BSA. 1 tablet of p-Nitrophenol Phosphate pNPP is dissolved in 5 ml of glycine buffer (pH 10.4). 100 μl of pNPP substrate in glycine buffer is added to each test well. Standard wells in triplicate are prepared from the working dilution of the ExtrAvidin-Alkaline Phosphotase in glycine buffer: 1:5,000 (10⁰) >10^{-0.5}10⁻¹>10^{-1.5}0.5 μl of each dilution is added to triplicate wells and the resulting AP content in each well is 5.50 ng, 1.74 ng, 0.55 ng, 0.18 ng. 100 μl of pNNP reagent must then be added to each of the standard wells. The plate must be incubated at 37° C. for 4h. A volume of 50 μl of 3M NaOH is added to all wells. The results are quantified on a plate reader at 405 nm. The background subtraction option is used on blank wells filled with glycine buffer only. The template is set up to indicate the concentration of AP-conjugate in each standard well [5.50 ng; 1.74 ng; 0.55 ng; 0.18 ng]. Results are indicated as amount of bound AP-conjugate in each sample.

[1166] The studies described in this example tested activity of agonists or antagonists of the invention. However, one skilled in the art could easily modify the exemplified studies to test the activity of polynucleotides or polypeptides of the invention (e.g., gene therapy).

### Example 30

### Production Of Polypeptide of the Invention for High-Throughput Screening Assays

[1167] The following protocol produces a supernatant containing polypeptide of the present invention to be tested. This supernatant can then be used in the Screening Assays described in Examples 32-41.

[1168] First, dilute Poly-D-Lysine (644 587 Boehringer-Mannheim) stock solution (lmg/ml in PBS) 1:20 in PBS (w/o calcium or magnesium 17-516F Biowhittaker) for a working solution of 50 ug/ml. Add 200 ul of this solution to each well (24 well plates) and incubate at RT for 20 minutes. Be sure to distribute the solution over each well (note: a 12-channel pipetter may be used with tips on every other channel). Aspirate off the Poly-D-Lysine solution and rinse with 1 ml PBS (Phosphate Buffered Saline). The PBS should remain in the well until just prior to plating the cells and plates may be poly-lysine coated in advance for up to two weeks.

[1169] Plate 293T cells (do not carry cells past P+20) at 2×10⁵ cells/well in 0.5 ml DMEM(Dulbecco's Modified Eagle Medium)(with 4.5 G/L glucose and L-glutamine (12-604F Biowhittaker))/10% heat inactivated FBS(14-503F Biowhittaker)/1× Penstrep(17-602E Biowhittaker). Let the cells grow overnight.

[1170] The next day, mix together in a sterile solution basin: 300 ul Lipofectamine (18324-012 Gibco/BRL) and 5 ml Optimem I (31985070 Gibco/BRL)/96-well plate. With a small volume multi-channel pipetter, aliquot approximately 2 ug of an expression vector containing a polynucleotide insert, produced by the methods described in Examples 8-10, into an appropriately labeled 96-well round bottom plate. With a multi-channel pipetter, add 50 ul of the Lipofectamine/Optimem I mixture to each well. Pipette up and down gently to mix. Incubate at RT 15-45 minutes. After about 20 minutes, use a multi-channel pipetter to add 150 ul Optimem I to each well. As a control, one plate of vector DNA lacking an insert should be transfected with each set of transfections.

[1171] Preferably, the transfection should be performed by tag-teaming the following tasks. By tag-teaming, hands on time is cut in half, and the cells do not spend too much time on PBS. First, person A aspirates off the media from four 24-well plates of cells, and then person B rinses each well with 0.5-1 ml PBS. Person A then aspirates off PBS rinse, and person B, using a 12-channel pipetter with tips on every other channel, adds the 200 ul of DNA/Lipofectamine/Optimem I complex to the odd wells first, then to the even wells, to each row on the 24-well plates. Incubate at 37 degree C for 6 hours.

[1172] While cells are incubating, prepare appropriate media, either 1% BSA in DMEM with lx penstrep, or HGS CHO-5 media (116.6 mg/L of CaCl2 (anhyd); 0.00130 mg/L CuSO₄-5H2O; 0.050 mg/L of Fe(NO₃)₃-9H2O; 0.417 mg/L of FeSO₄-7H₂O; 311.80 mg/L of Kcl; 28.64 mg/L of MgCl₂; 48.84 mg/L of MgSO₄; 6995.50 mg/L of NaCl; 2400.0 mg/L of NaHCO₃; 62.50 mg/L of NaH₂PO₄-H₂O; 71.02 mg/L, of Na₂HPO4; 0.4320 mg/L of ZnSO₄-7H₂O; 0.002 mg/L of Arachidonic Acid; 1.022 mg/L of Cholesterol; 0.070 mg/L of DL-alpha-Tocopherol-Acetate; 0.0520 mg/L of Linoleic Acid; 0.010 mg/L of Linolenic Acid; 0.010 mg/L of Myristic Acid; 0.010 mg/L of Oleic Acid; 0.010 mg/L of Palmitric Acid; 0.010 mg/L of Palmitic Acid; 100 mg/L of Pluronic F-68; 0.010 mg/L of Stearic Acid; 2.20 mg/L of Tween 80; 4551 mg/L of D-Glucose; 130.85 mg/ml of L-Alanine; 147.50 mg/ml of L-Arginine-HCL; 7.50 mg/ml of L-Asparagine-H₂O; 6.65 mg/ml of L-Aspartic Acid; 29.56 mg/ml of L-Cystine-2HCL-H₂O; 31.29 mg/ml of L-Cystine-2HCL; 7.35 mg/ml of L-Glutamic Acid; 365.0 mg/ml of L-Glutamine; 18.75 mg/ml of Glycine; 52.48 mg/ml of L-Histidine-HCL-H₂0; 106.97 mg/ml of L-Isoleucine; 111.45 mg/ml of L-Leucine; 163.75 mg/ml of L-Lysine HCL; 32.34 mg/ml of L-Methionine; 68.48 mg/ml of L-Phenylalainine; 40.0 mg/ml of L-Proline; 26.25 mg/ml of L-Serine; 101.05 mg/mil of L-Threonine; 19.22 mg/ml of L-Tryptophan; 91.79 mg/ml of L-Tryrosine-2Na-2H₂0, and 99.65 mg/ml of L-Valine; 0.0035 mg/L of Biotin; 3.24 mg/L of D-Ca Pantothenate; 11.78 mg/L of Choline Chloride; 4.65 mg/L of Folic Acid; 15.60 mg/L of i-Inositol; 3.02 mg/L of Niacinamide; 3.00 mg/L of Pyridoxal HCL; 0.031 mg/L of Pyridoxine HCL; 0.319 mg/L of Riboflavin; 3.17 mg/L of Thiamine HCL; 0.365 mg/L of Thymidine; 0.680 mg/L of Vitamin B₁₂; 25 mM of HEPES Buffer; 2.39 mg/L of Na Hypoxanthine; 0.105 mg/L of Lipoic Acid; 0.081 mg/L of Sodium Putrescine-2HCL; 55.0 mg/L of Sodium Pyruvate; 0.0067 mg/L of Sodium Selenite; 20 uM of Ethanolamine; 0.122 mg/L of Ferric Citrate; 41.70 mg/L of Methyl-B-Cyclodextrin complexed with Linoleic Acid; 33.33 mg/L of Methyl-B-Cyclodextrin complexed with Oleic Acid; 10 mg/L of Methyl-B-Cyclodextrin complexed with Retinal Acetate. Adjust osmolarity to 327 mOsm) with 2 mm glutamine and 1× penstrep. (BSA (81-068-3 Bayer) 100 gm dissolved in 1L DMEM for a 10% BSA stock solution). Filter the media and collect 50 ul for endotoxin assay in 15 ml polystyrene conical.

[1173] The transfection reaction is terminated, preferably by tag-teaming, at the end of the incubation period. Person A aspirates off the transfection media, while person B adds 1.5 ml appropriate media to each well. Incubate at 37 degree C for 45 or 72 hours depending on the media used: 1% BSA for 45 hours or CHO-5 for 72 hours.

[1174] On day four, using a 300 ul multichannel pipetter, aliquot 600 ul in one 1 ml deep well plate and the remaining supernatant into a 2 ml deep well. The supernatants from each well can then be used in the assays described in Examples 32-39.

[1175] It is specifically understood that when activity is obtained in any of the assays described below using a supernatant, the activity originates from either the polypeptide of the present invention directly (e.g., as a secreted protein) or by polypeptide of the present invention inducing expression of other proteins, which are then secreted into the supernatant. Thus, the invention further provides a method of identifying the protein in the supernatant characterized by an activity in a particular assay.

### Example 31

### Construction of GAS Reporter Construct

[1176] One signal transduction pathway involved in the differentiation and proliferation of cells is called the Jaks-STATs pathway. Activated proteins in the Jaks-STATs pathway bind to gamma activation site “GAS” elements or interferon-sensitive responsive element (“ISRE”), located in the promoter of many genes. The binding of a protein to these elements alter the expression of the associated gene.

[1177] GAS and ISRE elements are recognized by a class of transcription factors called Signal Transducers and Activators of Transcription, or “STATs.” There are six members of the STATs family. Stat1 and Stat3 are present in many cell types, as is Stat2 (as response to IFN-alpha is widespread). Stat4 is more restricted and is not in many cell types though it has been found in T helper class I, cells after treatment with IL-12. Stat5 was originally called mammary growth factor, but has been found at higher concentrations in other cells including myeloid cells. It can be activated in tissue culture cells by many cytokines.

[1178] The STATs are activated to translocate from the cytoplasm to the nucleus upon tyrosine phosphorylation by a set of kinases known as the Janus Kinase (“Jaks”) family. Jaks represent a distinct family of soluble tyrosine kinases and include Tyk2, Jak1, Jak2, and Jak3. These kinases display significant sequence similarity and are generally catalytically inactive in resting cells.

[1179] The Jaks are activated by a wide range of receptors summarized in the Table below. (Adapted from review by Schidler and Darnell, Ann. Rev. Biochem. 64:621-51 (1995)). A cytokine receptor family, capable of activating Jaks, is divided into two groups: (a) Class 1 includes receptors for IL-2, IL-3, IL-4, IL-6, IL-7, IL-9, IL-11, IL-12, IL-15, Epo, PRL, GH, G-CSF, GM-C SF, LIF, CNTF, and thrombopoietin; and (b) Class 2 includes IFN-a, IFN-g, and IL-10. The Class I receptors share a conserved cysteine motif (a set of four conserved cysteines and one tryptophan) and a WSXWS motif (a membrane proximal region encoding Trp-Ser-Xaa-Trp-Ser (SEQ ID NO: 2)).

[1180] Thus, on binding of a ligand to a receptor, Jaks are activated, which in turn activate STATs, which then translocate and bind to GAS elements. This entire process is encompassed in the Jaks-STATs signal transduction pathway. Therefore, activation of the Jaks-STATs pathway, reflected by the binding of the GAS or the ISRE element, can be used to indicate proteins involved in the proliferation and differentiation of cells. For example, growth factors and cytokines are known to activate the Jaks-STATs pathway (See Table below). Thus, by using GAS elements linked to reporter molecules, activators of the Jaks-STATs pathway can be identified.

| | | JAKs | | | | |
|---|---|---|---|---|---|---|
| Ligand | tyk2 | Jak1 | Jak2 | Jak3 | STATS | GAS(elements) or ISRE |
| IFN family | | | | | | |
| IFN-a/B | + | + | − | − | 1,2,3 | ISRE |
| IFN-g | | + | + | − | 1 | GAS (IRF1 > Lys6 > IFP) |
| Il-10 | + | ? | ? | − | 1,3 | |
| gp130 family | | | | | | |
| IL-6 (Pleiotropic) | + | + | + | ? | 1,3 | GAS (IRF1 > Lys6 > IFP) |
| Il-11 (Pleiotropic) | ? | + | ? | ? | 1,3 | |
| OnM (Pleiotropic) | ? | + | + | ? | 1,3 | |
| LIF (Pleiotropic) | ? | + | + | ? | 1,3 | |
| CNTF (Pleiotropic) | −/+ | + | + | ? | 1,3 | |
| G-CSF (Pleiotropic) | ? | + | ? | ? | 1,3 | |
| IL-12 (Pleiotropic) | + | − | + | + | 1,3 | |
| g-C family | | | | | | |
| IL-2 (lymphocytes) | − | + | − | + | 1,3,5 | GAS |
| IL-4 (lymph/myeloid) | − | + | − | + | 6 | GAS (IRF1 = IFP >> Ly6)(IgH) |
| IL-7 (lymphocytes) | − | + | − | + | 5 | GAS |
| IL-9 (lymphocytes) | − | + | − | + | 5 | GAS |
| IL-13 (lymphocyte) | − | + | ? | ? | 6 | GAS |
| IL-15 | ? | + | ? | + | 5 | GAS |
| gp140 family | | | | | | |
| IL-3 (myeloid) | − | − | + | − | 5 | GAS (IRF1 > IFP >> Ly6) |
| IL-5 (myeloid) | − | − | + | − | 5 | GAS |
| GM-CSF (myeloid) | − | − | + | − | 5 | GAS |
| Growth hormone family | | | | | | |
| GH | ? | − | + | − | 5 | |
| PRL | ? | +/− | + | − | 1,3,5 | |
| EPO | ? | − | + | − | 5 | GAS (B-CAS > IRF1 = IFP >> Ly6) |
| Receptor Tyrosine Kinases | | | | | | |
| EGF | ? | + | + | − | 1,3 | GAS (IRF1) |
| PDGF | ? | + | + | − | 1,3 | |
| CSF-1 | ? | + | + | − | 1,3 | GAS (not IRF1) |

[1181] To constuct a synthetic GAS containing promoter element, which is used in the Biological Assays described in Examples 32-33, a PCR based strategy is employed to generate a GAS-SV40 promoter sequence. The 5′ primer contains four tandem copies of the GAS binding site found in the IRF1 promoter and previously demonstrated to bind STATs upon induction with a range of cytokines (Rothman et al., Immunity 1:457-468 (1994).), although other GAS or ISRE elements can be used instead. The 5′ primer also contains 18bp of sequence complementary to the SV40 early promoter sequence and is flanked with an XhoI site. The sequence of the 5′ primer is:

(SEQ ID NO:3)
5′:GCGCCTCGAGATTTCCCCGAAATCTAGATTTCCCCGAAATGATTTCC
CCGAAATGATTTCCCCGAAATATCTGCCATCTCAATTAG:3′

[1182] The downstream primer is complementary to the SV40 promoter and is flanked with a Hind III site: 5′:GCGGCAAGCTTTTTGCAAAGCCTAGGC:3′ (SEQ ID NO: 4)

[1183] PCR amplification is performed using the SV40 promoter template present in the B-gal:promoter plasmid obtained from Clontech. The resulting PCR fragment is digested with Xhol/Hind III and subcloned into BLSK2-. (Stratagene.) Sequencing with forward and reverse primers confirms that the insert contains the following sequence:

| | |
|---|---|
| 5′:CTCGAGATTTCCCCGAAATCTAGATTTCCCCGAA | (SEQ ID NO:5) |
| ATGATTTCCCCGAAATATCTGCCATCTCAATTAGTCA | |
| GCAACCATAGTCCCGCCCCTAACTCCGCCCATCCCGC | |
| CCCTAACTCCGCCCAGTTCCGCCCATTCTCCGCCCCA | |
| TGGCTGACTAATTTTTTTTATTTATGCAGAGGCCGAG | |
| GCCGCCTCGGCCTCTGAGCTATTCCAGAAGTAGTGAG | |
| GAGGCTTTTTTGGAGGCCTAGGCTTTTGCAAAAAGCT | |
| T:3′ | |

[1184] With this GAS promoter element linked to the SV40 promoter, a GAS:SEAP2 reporter construct is next engineered. Here, the reporter molecule is a secreted alkaline phosphatase, or “SEAP.” Clearly, however, any reporter molecule can be instead of SEAP, in this or in any of the other Examples. Well known reporter molecules that can be used instead of SEAP include chloramphenicol acetyltransferase (CAT), luciferase, alkaline-phosphatase, B-galactosidase, green fluorescent protein (GFP), or any protein detectable by an antibody.

[1185] The above sequence confirmed synthetic GAS-SV40 promoter element is subcloned into the pSEAP-Promoter vector obtained from Clontech using HindIII and XhoI, effectively replacing the SV40 promoter with the amplified GAS:SV40 promoter element, to create the GAS-SEAP vector. However, this vector does not contain a neomycin resistance gene, and therefore, is not preferred for mammalian expression systems.

[1186] Thus, in order to generate mammalian stable cell lines expressing the GAS-SEAP reporter, the GAS-SEAP cassette is removed from the GAS-SEAP vector using SalI and NotI, and inserted into a backbone vector containing the neomycin resistance gene, such as pGFP-1 (Clontech), using these restriction sites in the multiple cloning site, to create the GAS-SEAP/Neo vector. Once this vector is transfected into mammalian cells, this vector can then be used as a reporter molecule for GAS binding as described in Examples 32-33.

[1187] Other constructs can be made using the above description and replacing GAS with a different promoter sequence. For example, construction of reporter molecules containing EGR and NF-KB promoter sequences are described in Examples 34 and 35. However, many other promoters can be substituted using the protocols described in these Examples. For instance, SRE, IL-2, NFAT, or Osteocalcin promoters can be substituted, alone or in combination (e.g., GAS/NF-KB/EGR, GAS/NF-KB, Il-2/NFAT, or NF-KB/GAS). Similarly, other cell lines can be used to test reporter construct activity, such as HELA (epithelial), HUVEC (endothelial), Reh (B-cell), Saos-2 (osteoblast), HUVAC (aortic), or Cardiomyocyte.

### Example 32

### High-Throughput Screening Assay for T-cell Activity.

[1188] The following protocol is used to assess T-cell activity by identifying factors, and determining whether supernate containing a polypeptide of the invention proliferates and/or differentiates T-cells. T-cell activity is assessed using the GAS/SEAP/Neo construct produced in Example 31. Thus, factors that increase SEAP activity indicate the ability to activate the Jaks-STATS signal transduction pathway. The T-cell used in this assay is Jurkat T-cells (ATCC Accession No. TIB-152), although Molt-3 cells (ATCC Accession No. CRL-1552) and Molt-4 cells (ATCC Accession No. CRL-1582) cells can also be used.

[1189] Jurkat T-cells are lymphoblastic CD4+Thl helper cells. In order to generate stable cell lines, approximately 2 million Jurkat cells are transfected with the GAS-SEAP/neo vector using DMRIE-C (Life Technologies)(transfection procedure described below). The transfected cells are seeded to a density of approximately 20,000 cells per well and transfectants resistant to 1 mg/ml genticin selected. Resistant colonies are expanded and then tested for their response to increasing concentrations of interferon gamma. The dose response of a selected clone is demonstrated.

[1190] Specifically, the following protocol will yield sufficient cells for 75 wells containing 200 ul of cells. Thus, it is either scaled up, or performed in multiple to generate sufficient cells for multiple 96 well plates. Jurkat cells are maintained in RPMI +10% serum with 1% Pen-Strep. Combine 2.5 mls of OPTI-MEM (Life Technologies) with 10 ug of plasmid DNA in a T25 flask. Add 2.5 ml OPTI-MEM containing 50 ul of DMRIE-C and incubate at room temperature for 15-45 mins.

[1191] During the incubation period, count cell concentration, spin down the required number of cells (10⁷ per transfection), and resuspend in OPTI-MEM to a final concentration of 10⁷ cells/ml. Then add 1 ml of 1×10⁷ cells in OPTI-MEM to T25 flask and incubate at 37 degree C for 6 hrs. After the incubation, add 10 ml of RPMI+15% serum.

[1192] The Jurkat:GAS-SEAP stable reporter lines are maintained in RPMI+10% serum, 1 mg/ml Genticin, and 1% Pen-Strep. These cells are treated with supernatants containing polypeptide of the present invention or polypeptide of the present invention induced polypeptides as produced by the protocol described in Example 30.

[1193] On the day of treatment with the supernatant, the cells should be washed and resuspended in fresh RPMI+10% serum to a density of 500,000 cells per ml. The exact number of cells required will depend on the number of supernatants being screened. For one 96 well plate, approximately 10 million cells (for 10 plates, 100 million cells) are required.

[1194] Transfer the cells to a triangular reservoir boat, in order to dispense the cells into a 96 well dish, using a 12 channel pipette. Using a 12 channel pipette, transfer 200 ul of cells into each well (therefore adding 100, 000 cells per well).

[1195] After all the plates have been seeded, 50 ul of the supernatants are transferred directly from the 96 well plate containing the supernatants into each well using a 12 channel pipette. In addition, a dose of exogenous interferon gamma (0.1, 1.0, 10 ng) is added to wells H9, H10, and H11 to serve as additional positive controls for the assay.

[1196] The 96 well dishes containing Jurkat cells treated with supernatants are placed in an incubator for 48 hrs (note: this time is variable between 48-72 hrs). 35 ul samples from each well are then transferred to an opaque 96 well plate using a 12 channel pipette. The opaque plates should be covered (using sellophene covers) and stored at −20 degree C until SEAP assays are performed according to Example 36. The plates containing the remaining treated cells are placed at 4 degree C and serve as a source of material for repeating the assay on a specific well if desired.

[1197] As a positive control, 100 Unit/ml interferon gamma can be used which is known to activate Jurkat T cells. Over 30 fold induction is typically observed in the positive control wells.

[1198] The above protocol may be used in the generation of both transient, as well as, stable transfected cells, which would be apparent to those of skill in the art.

### Example 33

### High-Throughput Screening Assay Identifying Myeloid Activity

[1199] The following protocol is used to assess myeloid activity of polypeptide of the present invention by determining whether polypeptide of the present invention proliferates and/or differentiates myeloid cells. Myeloid cell activity is assessed using the GAS/SEAP/Neo construct produced in Example 31. Thus, factors that increase SEAP activity indicate the ability to activate the Jaks-STATS signal transduction pathway. The myeloid cell used in this assay is U937, a pre-monocyte cell line, although TF-1, HL60, or KG1 can be used.

[1200] To transiently transfect U937 cells with the GAS/SEAP/Neo construct produced in Example 31, a DEAE-Dextran method (Kharbanda et. al., 1994, Cell Growth & Differentiation, 5:259-265) is used. First, harvest 2×10⁷ U937 cells and wash with PBS. The U937 cells are usually grown in RPMI 1640 medium containing 10% heat-inactivated fetal bovine serum (FBS) supplemented with 100 units/ml penicillin and 100 mg/ml streptomycin.

[1201] Next, suspend the cells in 1 ml of 20 mM Tris-HCl (pH 7.4) buffer containing 0.5 mg/ml DEAE-Dextran, 8 ug GAS-SEAP2 plasmid DNA, 140 mM NaCl, 5 mM KCl, 375 uM Na₂HPO₄.7H₂O, 1 mM MgCl₂, and 675 uM CaCl₂. Incubate at 37 degrees C for 45 mm.

[1202] Wash the cells with RPMI 1640 medium containing 10% FBS and then resuspend in 10 ml complete medium and incubate at 37 degree C for 36 hr.

[1203] The GAS-SEAP/U937 stable cells are obtained by growing the cells in 400 ug/ml G418. The G418-free medium is used for routine growth but every one to two months, the cells should be re-grown in 400 ug/ml G418 for couple of passages.

[1204] These cells are tested by harvesting 1×10⁸ cells (this is enough for ten 96-well plates assay) and wash with PBS. Suspend the cells in 200 ml above described growth medium, with a final density of 5×10⁵ cells/ml. Plate 200 ul cells per well in the 96-well plate (or 1×10⁵ cells/well).

[1205] Add 50 ul of the supernatant prepared by the protocol described in Example 30. Incubate at 37 degee C for 48 to 72 hr. As a positive control, 100 Unit/ml interferon gamma can be used which is known to activate U937 cells. Over 30 fold induction is typically observed in the positive control wells. SEAP assay the supernatant according to the protocol described in Example 36.

### Example 34

### High-Throughput Screening Assay Identifying Neuronal Activity.

[1206] When cells undergo differentiation and proliferation, a group of genes are activated through many different signal transduction pathways. One of these genes, EGR1 (early growth response gene 1), is induced in various tissues and cell types upon activation. The promoter of EGRI is responsible for such induction. Using the EGR1 promoter linked to reporter molecules, activation of cells can be assessed by polypeptide of the present invention.

[1207] Particularly, the following protocol is used to assess neuronal activity in PC12 cell lines. PC12 cells (rat phenochromocytoma cells) are known to proliferate and/or differentiate by activation with a number of mitogens, such as TPA (tetradecanoyl phorbol acetate), NGF (nerve growth factor), and EGF (epidermal growth factor). The EGRI gene expression is activated during this treatment. Thus, by stably transfecting PC12 cells with a construct containing an EGR promoter linked to SEAP reporter, activation of PC12 cells by polypeptide of the present invention can be assessed.

[1208] The EGR/SEAP reporter construct can be assembled by the following protocol. The EGR-1 promoter sequence (−633 to +1)(Sakamoto K et al., Oncogene 6:867-871 (1991)) can be PCR amplified from human genomic DNA using the following primers:

| | |
|---|---|
| 5′GCGCTCGAGGGATGACAGCGATAGAACCCCGG-3′ | (SEQ ID NO:6) |
| 5′GCGAAGCTTCGCGACTCCCCGGATCCGCCTC-3′ | (SEQ ID NO:7) |

[1209] Using the GAS:SEAP/Neo vector produced in Example 31, EGR1 amplified product can then be inserted into this vector. Linearize the GAS:SEAP/Neo vector using restriction enzymes XhoI/HindIII, removing the GAS/SV40 stuffer. Restrict the EGR1 amplified product with these same enzymes. Ligate the vector and the EGRI promoter.

[1210] To prepare 96 well-plates for cell culture, two mls of a coating solution (1:30 dilution of collagen type I (Upstate Biotech Inc. Cat#08-115) in 30% ethanol (filter sterilized)) is added per one 10 cm plate or 50 ml per well of the 96-well plate, and allowed to air dry for 2 hr.

[1211] PC12 cells are routinely grown in RPMI-1640 medium (Bio Whittaker) containing 10% horse serum (JRH BIOSCIENCES, Cat. # 12449-78P), 5% heat-inactivated fetal bovine serum (FBS) supplemented with 100 units/ml penicillin and 100 ug/ml streptomycin on a precoated 10 cm tissue culture dish. One to four split is done every three to four days. Cells are removed from the plates by scraping and resuspended with pipetting up and down for more than 15 times.

[1212] Transfect the EGR/SEAP/Neo construct into PC12 using the Lipofectamine protocol described in Example 30.-EGR-SEAP/PC12 stable cells are obtained by growing the cells in 300 ug/ml G418. The G418-free medium is used for routine growth but every one to two months, the cells should be re-grown in 300 ug/ml G418 for couple of passages.

[1213] To assay for neuronal activity, a 10 cm plate with cells around 70 to 80% confluent is screened by removing the old medium. Wash the cells once with PBS (Phosphate buffered saline). Then starve the cells in low serum medium (RPMI-1640 containing 1% horse serum and 0.5% FBS with antibiotics) overnight.

[1214] The next morning, remove the medium and wash the cells with PBS. Scrape off the cells from the plate, suspend the cells well in 2 ml low serum medium. Count the cell number and add more low serum medium to reach final cell density as 5×10⁵ cells/ml.

[1215] Add 200 ul of'the cell suspension to each well of 96-well plate (equivalent to 1×10⁵ cells/well). Add 50 ul supernatant produced by Example 30, 37 degree C for 48 to 72 hr. As a positive control, a growth factor known to activate PC 12 cells through EGR can be used, such as 50 ng/ul of Neuronal Growth Factor (NGF). Over fifty-fold induction of SEAP is typically seen in the positive control wells. SEAP assay the supernatant according to Example 36.

### Example 35

### High-Throughput Screening Assay for T-cell Activity

[1216] NF-KB (Nuclear Factor KB) is a transcription factor activated by a wide variety of agents including the inflammatory cytokines IL-1 and TNF, CD30 and CD40, lymphotoxin-alpha and lymphotoxin-beta, by exposure to LPS or thrombin, and by expression of certain viral gene products. As a transcription factor, NF-KB regulates the expression of genes involved in immune cell activation, control of apoptosis (NF-KB appears to shield cells from apoptosis), B and T-cell development, anti-viral and antimicrobial responses, and multiple stress responses.

[1217] In non-stimulated conditions, NF-KB is retained in the cytoplasm with I-KB (Inhibitor KB). However, upon stimulation, I-KB is phosphorylated and degraded, causing NF-KB to shuttle to the nucleus, thereby activating transcription of target genes. Target genes activated by NF-KB include IL-2, IL-6, GM-CSF, ICAM-1 and class 1 MHC.

[1218] Due to its central role and ability to respond to a range of stimuli, reporter constructs utilizing the NF-KB promoter element are used to screen the supernatants produced in Example 30. Activators or inhibitors of NF-KB would be useful in treating, preventing, and/or diagnosing diseases. For example, inhibitors of NF-KB could be used to treat those diseases related to the acute or chronic activation of NF-KB, such as rheumatoid arthritis.

[1219] To construct a vector containing the NF-KB promoter element, a PCR based strategy is employed. The upstream primer contains four tandem copies of the NF-KB binding site (GGGGACTTTCCC) (SEQ ID NO: 8), 18 bp of sequence complementary to the 5′ end of the SV40 early promoter sequence, and is flanked with an XhoI site:

(SEQ ID NO:9)
5′:GCGGCCTCGAGGGGACTTTCCCGGGGACTTTCCGGGGACTTTCCGGG
ACTTTCCATCCTGCCATCTCAATTAG:3′

[1220] The downstream primer is complementary to the 3′ end of the SV40 promoter and is flanked with a Hind III site: 5′:GCGGCAAGCTTTTTGCAAAGCCTAGGC:3′ (SEQ ID NO: 4)

[1221] PCR amplification is performed using the SV40 promoter template present in the pB-gal:promoter plasmid obtained from Clontech. The resulting PCR fragment is digested with XhoI and Hind III and subcloned into BLSK2-. (Stratagene) Sequencing with the T7 and T3 primers confirms the insert contains the following sequence:

| | |
|---|---|
| 5′:CTCGAGGGGACTTTCCCGGGGACTTTCCGGGGA | (SEQ ID NO:10) |
| CTTTCCGGGACTTTCCATCTGCCATCTCAATTAGTC | |
| AGCAACCATAGTCCCGCCCCTAACTCCGCCCATCCC | |
| GCCCCTAACTCCGCCCAGTTCCGCCCATTCTCCGCC | |
| CCATGGCTGACTAATTTTTTTTATTTATGCAGAGGC | |
| CGAGGCCGCCTCGGCCTCTGAGCTATTCCAGAAGTA | |
| GTGAGGAGGCTTTTTTGGAGGCCTAGGCTTTTGCAA | |
| AAAGCTT:3′ | |

[1222] Next, replace the SV40 minimal promoter element present in the pSEAP2-promoter plasmid (Clontech) with this NF-KB/SV40 fragment using XhoI and HindIII. However, this vector does not contain a neomycin resistance gene, and therefore, is not preferred for mammalian expression systems.

[1223] In order to generate stable mammalian cell lines, the NF-KB/SV40/SEAP cassette is removed from the above NF-KB/SEAP vector using restriction enzymes SalI and NotI, and inserted into a vector containing neomycin resistance. Particularly, the NF-KB/SV40/SEAP cassette was inserted into pGFP-1 (Clontech), replacing the GFP gene, after restricting pGFP-1 with SalI and NotI.

[1224] Once NF-KB/SV40/SEAP/Neo vector is created, stable Jurkat T-cells are created and maintained according to the protocol described in Example 32. Similarly, the method for assaying supernatants with these stable Jurkat T-cells is also described in Example 32. As a positive control, exogenous TNF alpha (0.1,1, 10 ng) is added to wells H9, H10, and H11, with a 5-10 fold activation typically observed.

### Example 36

### Assay for SEAP Activity

[1225] As a reporter molecule for the assays described in Examples 32-35, SEAP activity is assayed using the Tropix Phospho-light Kit (Cat. BP-400) according to the following general procedure. The Tropix Phospho-light Kit supplies the Dilution, Assay, and Reaction Buffers used below.

[1226] Prime a dispenser with the 2.5× Dilution Buffer and dispense 15 ul of 2.5× dilution buffer into Optiplates containing 35 ul of a supernatant. Seal the plates with a plastic sealer and incubate at 65 degree C for 30 min. Separate the Optiplates to avoid uneven heating.

[1227] Cool the samples to room temperature for 15 minutes. Empty the dispenser and prime with the Assay Buffer. Add 50 ml Assay Buffer and incubate at room temperature 5min. Empty the dispenser and prime with the Reaction Buffer (see the Table below). Add 50 ul Reaction Buffer and incubate at room temperature for 20 minutes. Since the intensity of the chemiluminescent signal is time dependent, and it takes about 10 minutes to read 5 plates on a luminometer, thus one should treat 5 plates at each time and start the second set 10 minutes later.

[1228] Read the relative light unit in the luminometer. Set H12 as blank, and print the results. An increase in chemiluminescence indicates reporter activity.

Reaction Buffer Formulation:

| # of plates | Rxn buffer diluent (ml) | CSPD (ml) |
|---|---|---|
| 10 | 60 | 3 |
| 11 | 65 | 3.25 |
| 12 | 70 | 3.5 |
| 13 | 75 | 3.75 |
| 14 | 80 | 4 |
| 15 | 85 | 4.25 |
| 16 | 90 | 4.5 |
| 17 | 95 | 4.75 |
| 18 | 100 | 5 |
| 19 | 105 | 5.25 |
| 20 | 110 | 5.5 |
| 21 | 115 | 5.75 |
| 22 | 120 | 6 |
| 23 | 125 | 6.25 |
| 24 | 130 | 6.5 |
| 25 | 135 | 6.75 |
| 26 | 140 | 7 |
| 27 | 145 | 7.25 |
| 28 | 150 | 7.5 |
| 29 | 155 | 7.75 |
| 30 | 160 | 8 |
| 31 | 165 | 8.25 |
| 32 | 170 | 8.5 |
| 33 | 175 | 8.75 |
| 34 | 180 | 9 |
| 35 | 185 | 9.25 |
| 36 | 190 | 9.5 |
| 37 | 195 | 9.75 |
| 38 | 200 | 10 |
| 39 | 205 | 10.25 |
| 40 | 210 | 10.5 |
| 41 | 215 | 10.75 |
| 42 | 220 | 11 |
| 43 | 225 | 11.25 |
| 44 | 230 | 11.5 |
| 45 | 235 | 11.75 |
| 46 | 240 | 12 |
| 47 | 245 | 12.25 |
| 48 | 250 | 12.5 |
| 49 | 255 | 12.75 |
| 50 | 260 | 13 |

### Example 37

### High-Throughput Screening Assay Identifying Changes in Small Molecule Concentration and Membrane Permeability

[1229] Binding of a ligand to a receptor is known to alter intracellular levels of small molecules, such as calcium, potassium, sodium, and pH, as well as alter membrane potential. These alterations can be measured in an assay to identify supernatants which bind to receptors of a particular cell. Although the following protocol describes an assay for calcium, this protocol can easily be modified to detect changes in potassium, sodium, pH, membrane potential, or any other small molecule which is detectable by a fluorescent probe.

[1230] The following assay uses Fluorometric Imaging Plate Reader (“FLIPR”) to measure changes in fluorescent molecules (Molecular Probes) that bind small molecules. Clearly, any fluorescent molecule detecting a small molecule can be used instead of the calcium fluorescent molecule, fluo-4 (Molecular Probes, Inc.; catalog no. F-14202), used here.

[1231] For adherent cells, seed the cells at 10,000-20,000 cells/well in a Co-star black 96-well plate with clear bottom. The plate is incubated in a CO₂ incubator for 20 hours. The adherent cells are washed two times in Biotek washer with 200 ul of HBSS (Hank's Balanced Salt Solution) leaving 100 ul of buffer after the final wash.

[1232] A stock solution of 1 mg/ml fluo-4 is made in 10% pluronic acid DMSO. To load the cells with fluo-4, 50 ul of 12 ug/ml fluo-4 is added to each well. The plate is incubated at 37 degrees C in a CO₂ incubator for 60 min. The plate is washed four times in the Biotek washer with HBSS leaving 100 ul of buffer.

[1233] For non-adherent cells, the cells are spun down from culture media. Cells are re-suspended to 2-5×10⁶ cells/ml with HBSS in a 50-ml conical tube. 4 ul of 1 mg/ml fluo-4 solution in 10% pluronic acid DMSO is added to each ml of cell suspension. The tube is then placed in a 37 degrees C water bath for 30-60 min. The cells are washed twice with HBSS, resuspended to 1×10⁶ cells/ml, and dispensed into a microplate, 100 ul/well. The plate is centrifuged at 1000 rpm for 5 min. The plate is then washed once in Denley Cell Wash with 200 ul, followed by an aspiration step to 100 ul final volume.

[1234] For a non-cell based assay, each well contains a fluorescent molecule, such as fluo-4 . The supernatant is added to the well, and a change in fluorescence is detected.

[1235] To measure the fluorescence of intracellular calcium, the FLIPR is set for the following parameters: (1) System gain is 300-800 mW; (2) Exposure time is 0.4 second; (3) Camera F/stop is F/2; (4) Excitation is 488 nm; (5) Emission is 530 nm; and (6) Sample addition is 50 ul. Increased emission at 530 nm indicates an extracellular signaling event caused by the a molecule, either polypeptide of the present invention or a molecule induced by polypeptide of the present invention, which has resulted in an increase in the intracellular Ca⁺⁺ concentration.

### Example 38

### High-Throughput Screening Assay Identifying Tyrosine Kinase Activity

[1236] The Protein Tyrosine Kinases (PTK) represent a diverse group of transmembrane and cytoplasmic kinases. Within the Receptor Protein Tyrosine Kinase RPTK) group are receptors for a range of mitogenic and metabolic growth factors including the PDGF, FGF, EGF, NGF, HGF and Insulin receptor subfamilies. In addition there are a large family of RPTKs for which the corresponding ligand is unknown. Ligands for RPTKs include mainly secreted small proteins, but also membrane-bound and extracellular matrix proteins.

[1237] Activation of RPTK by ligands involves ligand-mediated receptor dimerization, resulting in transphosphorylation of the receptor subunits and activation of the cytoplasmic tyrosine kinases. The cytoplasmic tyrosine kinases include receptor associated tyrosine kinases of the src-family (e.g., src, yes, lck, lyn, fyn) and non-receptor linked and cytosolic protein tyrosine kinases, such as the Jak family, members of which mediate signal transduction triggered by the cytokine superfamily of receptors (e.g., the Interleukins, Interferons, GM-CSF, and Leptin).

[1238] Because of the wide range of known factors capable of stimulating tyrosine kinase activity, identifying whether polypeptide of the present invention or a molecule induced by polypeptide of the present invention is capable of activating tyrosine kinase signal transduction pathways is of interest. Therefore, the following protocol is designed to identify such molecules capable of activating the tyrosine kinase signal transduction pathways.

[1239] Seed target cells (e.g., primary keratinocytes) at a density of approximately 25,000 cells per well in a 96 well Loprodyne Silent Screen Plates purchased from Nalge Nunc (Naperville, Ill.). The plates are sterilized with two 30 minute rinses with 100% ethanol, rinsed with water and dried overnight. Some plates are coated for 2 hr with 100 ml of cell culture grade type I collagen (50 mg/ml), gelatin (2%) or polylysine (50 mg/ml), all of which can be purchased from Sigma Chemicals (St. Louis, Mo.) or 10% Matrigel purchased from Becton Dickinson (Bedford, Mass.), or calf serum, rinsed with PBS and stored at 4 degree C. Cell growth on these plates is assayed by seeding 5,000 cells/well in growth medium and indirect quantitation of cell number through use of alamarBlue as described by the manufacturer Alamar Biosciences, Inc. (Sacramento, Calif.) after 48 hr. Falcon plate covers #3071 from Becton Dickinson (Bedford, Mass.) are used to cover the Loprodyne Silent Screen Plates. Falcon Microtest III cell culture plates can also be used in some proliferation experiments.

[1240] To prepare extracts, A431 cells are seeded onto the nylon membranes of Loprodyne plates (20,000/200 ml/well) and cultured overnight in complete medium. Cells are quiesced by incubation in serum-free basal medium for 24 hr. After 5-20 minutes treatment with EGF (60 ng/ml) or 50 ul of the supernatant produced in Example 30, the medium was removed and 100 ml of extraction buffer ((20 mM HEPES pH 7.5, 0.15 M NaCl, 1% Triton X-100, 0.1% SDS, 2 mM Na3VO4, 2 mM Na4P207 and a cocktail of protease inhibitors (# 1836170) obtained from Boeheringer Mannheim (Indianapolis, Ind.)) is added to each well and the plate is shaken on a rotating shaker for 5 minutes at 40C. The plate is then placed in a vacuum transfer manifold and the extract filtered through the 0.45 mm membrane bottoms of each well using house vacuum. Extracts are collected in a 96-well catch/assay plate in the bottom of the vacuum manifold and immediately placed on ice. To obtain extracts clarified by centrifugation, the content of each well, after detergent solubilization for 5 minutes, is removed and centrifuged for 15 minutes at 4 degree C at 16,000× g.

[1241] Test the filtered extracts for levels of tyrosine kinase activity. Although many methods of detecting tyrosine kinase activity are known, one method is described here.

[1242] Generally, the tyrosine kinase activity of a supernatant is evaluated by determining its ability to phosphorylate a tyrosine residue on a specific substrate (a biotinylated peptide). Biotinylated peptides that can be used for this purpose include PSK1 (corresponding to amino acids 6-20 of the cell division kinase cdc2-p34) and PSK2 (corresponding to amino acids 1-17 of gastrin). Both peptides are substrates for a range of tyrosine kinases and are available from Boehringer Mannheim.

[1243] The tyrosine kinase reaction is set up by adding the following components in order. First, add 10 ul of 5 uM Biotinylated Peptide, then 10 ul ATP/Mg₂₊ (5 mM ATP/50 mM MgCl₂), then 10 ul of 5× Assay Buffer (40 mM imidazole hydrochloride, pH7.3, 40 mM beta-glycerophosphate, 1 mM EGTA, 100 mM MgCl₂, 5 mM MnCl₂, 0.5 mg/ml BSA), then 5 ul of Sodium Vanadate(1 mM), and then 5 ul of water. Mix the components gently and preincubate the reaction mix at 30 degree C for 2 min. Initial the reaction by adding 10 ul of the control enzyme or the filtered supernatant.

[1244] The tyrosine kinase assay reaction is then terminated by adding 10 ul of 120 mm EDTA and place the reactions on ice.

[1245] Tyrosine kinase activity is determined by transferring 50 ul aliquot of reaction mixture to a microtiter plate (MTP) module and incubating at 37 degree C for 20 min. This allows the streptavidin coated 96 well plate to associate with the biotinylated peptide. Wash the MTP module with 300 ul/well of PBS four times. Next add 75 ul of anti-phospotyrosine antibody conjugated to horse radish peroxidase(anti-P-Tyr-POD(0.5 u/ml)) to each well and incubate at 37 degree C for one hour. Wash the well as above.

[1246] Next add 100 ul of peroxidase substrate solution (Boehringer Mannheim) and incubate at room temperature for at least 5 mins (up to 30 min). Measure the absorbance of the sample at 405 nm by using ELISA reader. The level of bound peroxidase activity is quantitated using an ELISA reader and reflects the level of tyrosine kinase activity.

### Example 39

### High-Throughput Screening Assay Identifying Phosphorylation Activity

[1247] As a potential alternative and/or complement to the assay of protein tyrosine kinase activity described in Example 38, an assay which detects activation (phosphorylation) of major intracellular signal transduction intermediates can also be used. For example, as described below one particular assay can detect tyrosine phosphorylation of the Erk-1 and Erk-2 kinases. However, phosphorylation of other molecules, such as Raf, JNK, p38 MAP, Map kinase kinase (MEK), MEK kinase, Src, Muscle specific kinase (MuSK), IRAK, Tec, and Janus, as well as any other phosphoserine, phosphotyrosine, or phosphothreonine molecule, can be detected by substituting these molecules for Erk-1 or Erk-2 in the following assay.

[1248] Specifically, assay plates are made by coating the wells of a 96-well ELISA plate with 0.1 ml of protein G (1 ug/ml) for 2 hr at room temp, (RT). The plates are then rinsed with PBS and blocked with 3% BSA/PBS for 1 hr at RT. The protein G plates are then treated with 2 commercial mono clonal antibodies (100 ng/well) against Erk-1 and Erk-2 (1 hr at RT) (Santa Cruz Biotechnology). (To detect other molecules, this step can easily be modified by substituting a monoclonal antibody detecting any of the above described molecules.) After 3-5 rinses with PBS, the plates are stored at 4 degree C until use.

[1249] A431 cells are seeded at 20,000/well in a 96-well Loprodyne filterplate and cultured overnight in growth medium. The cells are then starved for 48 hr in basal medium (DMEM) and then treated with EGF (6 ng/well) or 50 ul of the supernatants obtained in Example 30 for 5-20 minutes. The cells are then solubilized and extracts filtered directly into the assay plate.

[1250] After incubation with the extract for 1 hr at RT, the wells are again rinsed. As a positive control, a commercial preparation of MAP kinase (long/well) is used in place of A431 extract. Plates are then treated with a commercial polyclonal (rabbit) antibody (1 ug/ml) which specifically recognizes the phosphorylated epitope of the Erk-1 and Erk-2 kinases (1 hr at RT). This antibody is biotinylated by standard procedures. The bound polyclonal antibody is then quantitated by successive incubations with Europium-streptavidin and Europium fluorescence enhancing reagent in the Wallac DELFIA instrument (time-resolved fluorescence). An increased fluorescent signal over background indicates a phosphorylation by polypeptide of the present invention or a molecule induced by polypeptide of the present invention.

### Example 40

### Assay for the Stimulation of Bone Marrow CD34+ Cell Proliferation

[1251] This assay is based on the ability of human CD34+ to proliferate in the presence of hematopoietic growth factors and evaluates the ability of isolated polypeptides expressed in mammalian cells to stimulate proliferation of CD34+ cells.

[1252] It has been previously shown that most mature precursors will respond to only a single signal. More immature precursors require at least two signals to respond. Therefore, to test the effect of polypeptides on hematopoietic activity of a wide range of progenitor cells, the assay contains a given polypeptide in the presence or absence of other hematopoietic growth factors. Isolated cells are cultured for 5 days in the presence of Stem Cell Factor (SCF) in combination with tested sample. SCF alone has a very limited effect on the proliferation of bone marrow (BM) cells, acting in such conditions only as a “survival” factor. However, combined with any factor exhibiting stimulatory effect on these cells (e.g., IL-3), SCF will cause a synergistic effect Therefore, if the tested polypeptide has a stimulatory effect on hematopoietic progenitors, such activity can be easily detected. Since normal BM cells have a low level of cycling cells, it is likely that any inhibitory effect of a given polypeptide, or agonists or antagonists thereof, might not be detected. Accordingly, assays for an inhibitory effect on progenitors is preferably tested in cells that are first subjected to in vitro stimulation with SCF+IL+3, and then contacted with the compound that is being evaluated for inhibition of such induced proliferation.

[1253] Briefly, CD34+ cells are isolated using methods known in the art. The cells are thawed and resuspended in medium (QBSF 60 serum-free medium with 1% L-glutamine (500 ml) Quality Biological, Inc., Gaithersburg, Md. Cat# 160-204-101). After several gentle centrifugation steps at 200× g, cells are allowed to rest for one hour. The cell count is adjusted to 2.5×10⁵ cells/ml. During this time, 100 μl of sterile water is added to the peripheral wells of a 96-well plate. The cytokines that can be tested with a given polypeptide in this assay is rhSCF (R&D Systems, Minneapolis, Minn., Cat# 255-SC) at 50 ng/ml alone and in combination with rhSCF and rhIL-3 (R&D Systems, Minneapolis, Minn., Cat# 203-ML) at 30 ng/ml. After one hour, 10 μl of prepared cytokines, 50 μl of the supernatants prepared in Example 30 (supernatants at 1:2 dilution=50 μl) and 20 μl of diluted cells are added to the media which is already present in the wells to allow for a final total volume of 100 μl. The plates are then placed in a 37° C./5% CO₂ incubator for five days.

[1254] Eighteen hours before the assay is harvested, 0.5 μCi/well of [3H] Thymidine is added in a 10 μl volume to each well to determine the proliferation rate. The experiment is terminated by harvesting the cells from each 96-well plate to a filtermat using the Tomtec Harvester 96. After harvesting, the filtermats are dried, trimmed and placed into OmniFilter assemblies consisting of one OmniFilter plate and one OmniFilter Tray. 60 μl Microscint is added to each well and the plate sealed with TopSeal-A press-on sealing film A bar code 15 sticker is affixed to the first plate for counting. The sealed plates are then loaded and the level of radioactivity determined via the Packard Top Count and the printed data collected for analysis. The level of radioactivity reflects the amount of cell proliferation.

[1255] The studies described in this example test the activity of a given polypeptide to stimulate bone marrow CD34+ cell proliferation. One skilled in the art could easily modify the exemplified studies to test the activity of polynucleotides (e.g., gene therapy), antibodies, agonists, and/or antagonists and fragments and variants thereof. As a nonlimiting example, potential antagonists tested in this assay would be expected to inhibit cell proliferation in the presence of cytokines and/or to increase the inhibition of cell proliferation in the presence of cytokines and a given polypeptide. In contrast, potential agonists tested in this assay would be expected to enhance cell proliferation and/or to decrease the inhibition of cell proliferation in the presence of cytokines and a given polypeptide.

[1256] The ability of a gene to stimulate the proliferation of bone marrow CD34+ cells indicates that polynucleotides and polypeptides corresponding to the gene are useful for the diagnosis and treatment of disorders affecting the immune system and hematopoiesis. Representative uses are described in the “Immune Activity” and “Infectious Disease” sections above, and elsewhere herein.

### Example 41

### Assay for Extracellular Matrix Enhanced Cell Response (EMECR)

[1257] The objective of the Extracellular Matrix Enhanced Cell Response (EMECR) assay is to identify gene products (e.g., isolated polypeptides) that act on the hematopoietic stem cells in the context of the extracellular matrix (ECM) induced signal.

[1258] Cells respond to the regulatory factors in the context of signal(s) received from the surrounding microenvironment. For example, fibroblasts, and endothelial and epithelial stem cells fail to replicate in the absence of signals from the ECM. Hematopoietic stem cells can undergo self-renewal in the bone marrow, but not in in vitro suspension culture. The ability of stem cells to undergo self-renewal in vitro is dependent upon their interaction with the stromal cells and the ECM protein fibronectin (fn). Adhesion of cells to fn is mediated by the α₅.β₁ and α₄.β₁ integrin receptors, which are expressed by human and mouse hematopoietic stem cells. The factor(s) which integrate with the ECM environment and are responsible for stimulating stem cell self-renewal have a not yet been identified. Discovery of such factors should be of great interest in gene therapy and bone marrow transplant applications

[1259] Briefly, polystyrene, non tissue culture treated, 96-well plates are coated with fn fragment at a coating concentration of 0.2 μg/cm². Mouse bone marrow cells are plated (1,000 cells/well) in 0.2 ml of serum-free medium. Cells cultured in the presence of IL-3 (5 ng/ml)+SCF (50 ng/ml) would serve as the positive control, conditions under which little self-renewal but pronounced differentiation of the stem cells is to be expected. Gene products of the invention (e.g., including, but not limited to, polynucleotides and polypeptides of the present invention, and supernatants produced in Example 30), are tested with appropriate negative controls in the presence and absence of SCF(5.0 ng/ml), where test factor supernatants represent 10% of the total assay volume. The plated cells are then allowed to grow by incubating in a low oxygen environment (5% CO₂, 7% O₂, and 88% N₂ ) tissue culture incubator for 7 days. The number of proliferating cells within the wells is then quantitated by measuring thymidine incorporation into cellular DNA. Verification of the positive hits in the assay will require phenotypic characterization of the cells, which can be accomplished by scaling up of the culture system and using appropriate antibody reagents against cell surface antigens and FACScan.

[1260] One skilled in the art could easily modify the exemplified studies to test the activity of polynucleotides (e.g., gene therapy), antibodies, agonists, and/or antagonists and fragments and variants thereof.

[1261] If a particular polypeptide of the present invention is found to be a stimulator of hematopoietic progenitors, polynucleotides and polypeptides corresponding to the gene encoding said polypeptide may be useful for the diagnosis and treatment of disorders affecting the immune system and hematopoiesis. Representative uses are described in the “Immune Activity” and “Infectious Disease” sections above, and elsewhere herein. The gene product may also be useful in the expansion of stem cells and committed progenitors of various blood lineages, and in the differentiation and/or proliferation of various cell types.

[1262] Additionally, the polynucleotides and/or polypeptides of the gene of interest and/or agonists and/or antagonists thereof, may also be employed to inhibit the proliferation and differentiation of hematopoietic cells and therefore may be employed to protect bone marrow stem cells from chemotherapeutic agents during chemotherapy. This antiproliferative effect may allow administration of higher doses of chemotherapeutic agents and, therefore, more effective chemotherapeutic treatment.

[1263] Moreover, polynucleotides and polypeptides corresponding to the gene of interest may also be useful for the treatment and diagnosis of hematopoietic related disorders such as, for example, anemia, pancytopenia, leukopenia, thrombocytopenia or leukemia since stromal cells are important in the production of cells of hematopoietic lineages. The uses include bone marrow cell ex-vivo culture, bone marrow transplantation, bone marrow reconstitution, radiotherapy or chemotherapy of neoplasia.

### Example 42

### Human Dermal Fibroblast and Aortic Smooth Muscle Cell Proliferation

[1264] The polypeptide of interest is added to cultures of normal human dermal fibroblasts (NHDF) and human aortic smooth muscle cells (AoSMC) and two co-assays are performed with each sample. The first assay examines the effect of the polypeptide of interest on the proliferation of normal human dermal fibroblasts (NHDF) or aortic smooth muscle cells (AoSMC). Aberrant growth of fibroblasts or smooth muscle cells is a part of several pathological processes, including fibrosis, and restenosis. The second assay examines IL6 production by both NHDF and SMC. IL6 production is an indication of functional activation. Activated cells will have increased production of a number of cytokines and other factors, which can result in a proinflammatory or immunomodulatory outcome. Assays are run with and without co-TNFa stimulation, in order to check for costimulatory or inhibitory activity.

[1265] Briefly, on day 1, 96-well black plates are set up with 1000 cells/well (NHDF) or 2000 cells/well (AOSMC) in 100 μl culture media. NHDF culture media contains: Clonetics FB basal media, 1 mg/ml hFGF, 5 mg/ml insulin, 50mg/ml gentamycin, 2% FBS, while AoSMC culture media contains Clonetics SM basal media, 0.5 μg/ml hEGF, 5mg/ml insulin, 1 μg/ml hFGF, 50 mg/ml gentamycin, 50 μg/ml Amphotericin B, 5%FBS. After incubation at 37° C. for at least 4-5 hours culture media is aspirated and replaced with growth arrest media. Growth arrest media for NHDF contains fibroblast basal media, 50mg/ml gentamycin, 2% FBS, while growth arrest media for AoSMC contains SM basal media, 50mg/ml gentamycin, 50 μg/ml Amphotericin B, 0.4% FBS. Incubate at 37° C. until day 2.

[1266] On day 2, serial dilutions and templates of the polypeptide of interest are designed such that they always include media controls and known-protein controls. For both stimulation and inhibition experiments, proteins are diluted in growth arrest media. For inhibition experiments, TNFa is added to a final concentration of 2 ng/ml (NHDF) or 5 ng/ml (AoSMC). Add ⅓ vol media containing controls or polypeptides of the present invention and incubate at 37 degrees C/5% CO₂ until day 5.

[1267] Transfer 60 μl from each well to another labeled 96-well plate, cover with a plate-sealer, and store at 4 degrees C until Day 6 (for IL6 ELISA). To the remaining 100 μl in the cell culture plate, aseptically add Alamar Blue in an amount equal to 10% of the culture volume (10 μl). Return plates to incubator for 3 to 4 hours. Then measure fluorescence with excitation at 530 nm and emission at 590 nm using the CytoFluor. This yields the growth stimulation/inhibition data.

[1268] On day 5, the IL6 ELISA is performed by coating a 96 well plate with 50-100 ul/well of Anti-Human IL6 Monoclonal antibody diluted in PBS, pH 7.4, incubate ON at room temperature.

[1269] On day 6, empty the plates into the sink and blot on paper towels. Prepare Assay Buffer containing PBS with 4% BSA. Block the plates with 200 μl/well of Pierce Super Block blocking buffer in PBS for 1-2 hr and then wash plates with wash buffer (PBS, 0.05% TWeen-20). Blot plates on paper towels. Then add 50 μl/well of diluted Anti-Human IL-6 Monoclonal, Biotin-labeled antibody at 0.50 mg/ml. Make dilutions of IL-6 stock in media (30, 10, 3, 1, 0.3, 0 ng/ml). Add duplicate samples to top row of plate. Cover the plates and incubate for 2 hours at RT on shaker.

[1270] Plates are washed with wash buffer and blotted on paper towels. Dilute EU-labeled Streptavidin 1:1000 in Assay buffer, and add 100 μl/well. Cover the plate and incubate 1 h at RT. Plates are again washed with wash buffer and blotted on paper towels.

[1271] Add 100 μl/well of Enhancement Solution. Shake for 5 minutes. Read the plate on the Wallac DELFIA Fluorometer. Readings from triplicate samples in each assay were tabulated and averaged.

[1272] A positive result in this assay suggests AoSMC cell proliferation and that the polypeptide of the present invention may be involved in dermal fibroblast proliferation and/or smooth muscle cell proliferation. A positive result also suggests many potential uses of polypeptides, polynucleotides, agonists and/or antagonists of the polynucleotide/polypeptide of the present invention which gives a positive result. For example, inflammation and immune responses, wound healing, and angiogenesis, as detailed throughout this specification. Particularly, polypeptides of the present invention and polynucleotides of the present invention may be used in wound healing and dermal regeneration, as well as the promotion of vasculogenesis, both of the blood vessels and lymphatics. The growth of vessels can be used in the treatment of, for example, cardiovascular diseases. Additionally, antagonists of polypeptides and polynucleotides of the invention may be useful in treating diseases, disorders, and/or conditions which involve angiogenesis by acting as an anti-vascular agent (e.g., anti-angiogenesis). These diseases, disorders, and/or conditions are known in the art and/or are described herein, such as, for example, malignancies, solid tumors, benign tumors, for example hemangiomas, acoustic neuromas, neurofibromas, trachomas, and pyogenic granulomas; artheroscleric plaques; ocular angiogenic diseases, for example, diabetic retinopathy, retinopathy of prematurity, macular degeneration, corneal graft rejection, neovascular glaucoma, retrolental fibroplasia, rubeosis, retinoblastoma, uvietis and Pterygia (abnormal blood vessel growth) of the eye; rheumatoid arthritis; psoriasis; delayed wound healing; endometriosis; vasculogenesis; granulations; hypertrophic scars (keloids); nonunion fractures; scleroderma; trachoma; vascular adhesions; myocardial angiogenesis; coronary collaterals; cerebral collaterals; arteriovenous malformations; ischemic limb angiogenesis; Osler-Webber Syndrome; plaque neovascularization; telangiectasia; hemophiliac joints; angiofibroma; fibromuscular dysplasia; wound granulation; Crohn's disease; and atherosclerosis. Moreover, antagonists of polypeptides and polynucleotides of the invention may be useful in treating anti-hyperproliferative diseases and/or anti-inflammatory known in the art and/or described herein.

[1273] One skilled in the art could easily modify the exemplified studies to test the activity of polynucleotides (e.g., gene therapy), antibodies, agonists, and/or antagonists and fragments and variants thereof.

### Example 43

### Cellular Adhesion Molecule (CAM) Expression on Endothelial Cells

[1274] The recruitment of lymphocytes to areas of inflammation and angiogenesis involves specific receptor-ligand interactions between cell surface adhesion molecules (CAMs) on lymphocytes and the vascular endothelium. The adhesion process, in both normal and pathological settings, follows a multi-step cascade that involves intercellular adhesion molecule-1 (ICAM-1), vascular cell adhesion molecule-1 (VCAM-1), and endothelial leukocyte adhesion molecule-1 (E-selectin) expression on endothelial cells (EC). The expression of these molecules and others on the vascular endothelium determines the efficiency with which leukocytes may adhere to the local vasculature and extravasate into the local tissue during the development of an inflammatory response. The local concentration of cytokines and growth factor participate in the modulation of the expression of these CAMs.

[1275] Briefly, endothelial cells (e.g., Human Umbilical Vein Endothelial cells (HUVECs)) are grown in a standard 96 well plate to confluence, growth medium is removed from the cells and replaced with 100 μl of 199 Medium (10% fetal bovine serum (FBS)). Samples for testing and positive or negative controls are added to the plate in triplicate (in 10 μl volumes). Plates are then incubated at 37° C. for either 5 h (selectin and integrin expression) or 24 h (integrin expression only). Plates are aspirated to remove medium and 100 μl of 0.1% paraformaldehyde-PBS(with Ca++ and Mg++) is added to each well. Plates are held at 4° C. for 30 min. Fixative is removed from the wells and wells are washed 1× with PBS(+Ca,Mg)+0.5% BSA and drained. 10 μl of diluted primary antibody is added to the test and control wells. Anti-ICAM-1-Biotin, Anti-VCAM-1-Biotin and Anti-E-selectin-Biotin are used at a concentration of 10 μg/ml (1:10 dilution of 0.1 mg/ml stock antibody). Cells are incubated at 37° C. for 30 min. in a humidified environment. Wells are washed three times with PBS(+Ca,Mg) +0.5% BSA. 20 μl of diluted ExtrAvidin-Alkaline Phosphatase (1:5,000 dilution, referred to herein as the working dilution) are added to each well and incubated at 37° C. for 30 min. Wells are washed three times with PBS(+Ca,Mg)+0.5% BSA. Dissolve 1 tablet of p-Nitrophenol Phosphate pNPP per 5 ml of glycine buffer (pH 10.4). 100 μl of pNPP substrate in glycine buffer is added to each test well. Standard wells in triplicate are prepared from the working dilution of the ExtrAvidin-Alkaline Phosphotase in glycine buffer: 1:5,000 (10⁰)>10^{-0.5}10⁻¹>10^{-1.5}0.5 μl of each dilution is added to triplicate wells and the resulting AP content in each well is 5.50 ng, 1.74 ng, 0.55 ng, 0.18 ng. 100 μl of pNNP reagent is then added to each of the standard wells. The plate is incubated at 37° C. for 4h. A volume of 50 μl of 3M NaOH is added to all wells. The plate is read on a plate reader at 405 nm using the background subtraction option on blank wells filled with glycine buffer only. Additionally, the template is set up to indicate the concentration of AP-conjugate in each standard well [5.50 ng; 1.74 ng; 0.55 ng; 0.18 ng]. Results are indicated as amount of bound AP-conjugate in each sample.

### Example 44

### Alamar Blue Endothelial Cells Proliferation Assay

[1276] This assay may be used to quantitatively determine protein mediated inhibition of bFGF-induced proliferation of Bovine Lymphatic Endothelial Cells (LECs), Bovine Aortic Endothelial Cells (BAECS) or Human Microvascular Uterine Myometrial Cells (UTMECs). This assay incorporates a fluorometric growth indicator based on detection of metabolic activity. A standard Alamar Blue Proliferation Assay is prepared in EGM-2MV with 10 ng/ml of bFGF added as a source of endothelial cell stimulation. This assay may be used with a variety of endothelial cells with slight changes in growth medium and cell concentration. Dilutions of the protein batches to be tested are diluted as appropriate. Serum-free medium (GIBCO SFM) without bFGF is used as a non-stimulated control and Angiostatin or TSP-1 are included as a known inhibitory controls.

[1277] Briefly, LEC, BAECs or UTMECs are seeded in growth media at a density of 5000 to 2000 cells/well in a 96 well plate and placed at 37 degrees C overnight. After the overnight incubation of the cells, the growth media is removed and replaced with GIBCO EC-SFM. The cells are treated with the appropriate dilutions of the protein of interest or control protein sample(s) (prepared in SFM) in triplicate wells with additional bFGF to a concentration of 10 ng/ml. Once the cells have been treated with the samples, the plate(s) is/are placed back in the 37° C. incubator for three days. After three days 10 ml of stock alamar blue (Biosource Cat# DAL1100) is added to each well and the plate(s) is/are placed back in the 37° C. incubator for four hours. The plate(s) are then read at 530 nm excitation and 590 nm emission using the CytoFluor fluorescence reader. Direct output is recorded in relative-fluorescence units.

[1278] Alamar blue is an oxidation-reduction indicator that both fluoresces and changes color in response to chemical reduction of growth medium resulting from cell growth. As cells grow in culture, innate metabolic activity results in a chemical reduction of the immediate surrounding environment. Reduction related to growth causes the indicator to change from oxidized (non-fluorescent blue) form to reduced (fluorescent red) form (i.e., stimulated proliferation will produce a stronger signal and inhibited proliferation will produce a weaker signal and the total signal is proportional to the total number of cells as well as their metabolic activity). The background level of activity is observed with the starvation medium alone. This is compared to the output observed from the positive control samples (bFGF in growth medium) and protein dilutions.

### Example 45

### Detection of Inhibition of a Mixed Lymphocyte Reaction

[1279] This assay can be used to detect and evaluate inhibition of a Mixed Lymphocyte Reaction (MLR) by gene products (e.g., isolated polypeptides). Inhibition of a MLR may be due to a direct effect on cell proliferation and viability, modulation of costimulatory molecules on interacting cells, modulation of adhesiveness between lymphocytes and accessory cells, or modulation of cytokine production by accessory cells. Multiple cells may be targeted by these polypeptides since the peripheral blood mononuclear fraction used in this assay includes T, B and natural killer lymphocytes, as well as monocytes and dendritic cells.

[1280] Polypeptides of interest found to inhibit the MLR may find application in diseases associated with lymphocyte and monocyte activation or proliferation. These include, but are not limited to, diseases such as asthma, arthritis, diabetes, inflammatory skin conditions, psoriasis, eczema, systemic lupus erythematosus, multiple sclerosis, glomerulonephritis, inflammatory bowel disease, crohn's disease, ulcerative colitis, arteriosclerosis, cirrhosis, graft vs. host disease, host vs. graft disease, hepatitis, leukemia and lymphoma.

[1281] Briefly, PBMCs from human donors are purified by density gradient centrifugation using Lymphocyte Separation Medium (LSM®, density 1.0770 g/ml, Organon Teknika Corporation, West Chester, Pa.). PBMCs from two donors are adjusted to 2×10⁶ cells/ml in RPMI-1640 (Life Technologies, Grand Island, N.Y.) supplemented with 10% FCS and 2 mM glutamine. PBMCs from a third donor is adjusted to 2×10⁵ cells/ml. Fifty microliters of PBMCs from each donor is added to wells of a 96-well round bottom microtiter plate. Dilutions of test materials (50 μl) is added in triplicate to microtiter wells. Test samples (of the protein of interest) are added for final dilution of 1:4; rhuIL-2 (R&D Systems, Minneapolis, Minn., catalog number 202-IL) is added to a final concentration of 1 μg/ml; anti-CD4 mAb (R&D Systems, clone 34930.11, catalog number MAB379) is added to a final concentration of 10 μg/ml. Cells are cultured for 7-8 days at 37° C. in 5% CO₂, and 1 μC of [³H] thymidine is added to wells for the last 16 hrs of culture. Cells are harvested and thymidine incorporation determined using a Packard TopCount. Data is expressed as the mean and standard deviation of triplicate determinations.

[1282] Samples of the protein of interest are screened in separate experiments and compared to the negative control treatment, anti-CD4 mAb, which inhibits proliferation of lymphocytes and the positive control treatment, IL-2 (either as recombinant material or supernatant), which enhances proliferation of lymphocytes.

[1283] One skilled in the art could easily modify the exemplified studies to test the activity of polynucleotides (e.g., gene therapy), antibodies, agonists, and/or antagonists and fragments and variants thereof.

### Example 46

### Assays for Protease Activity

[1284] The following assay may be used to assess protease activity of the polypeptides of the invention.

[1285] Gelatin and casein zymography are performed essentially as described (Heusen et al., Anal. Biochem., 102:196-202 (1980); Wilson et al., Journal of Urology, 149:653-658 (1993)). Samples are run on 10% polyacryamide/0.1% SDS gels containing 1% gelain orcasein, soaked in 2.5% triton at room temperature for 1 hour, and in 0.1M glycine, pH 8.3 at 37° C. 5 to 16 hours. After staining in amido black areas of proteolysis apear as clear areas agains the blue-black background. Trypsin (Sigma T8642) is used as a positive control.

[1286] Protease activity is also determined by monitoring the cleavage of n-a-benzoyl-L-arginine ethyl ester (BAEE) (Sigma B-4500. Reactions are-set up in (25 mMNaPO₄,1 mM EDTA, and 1 mM BAEE), pH 7.5. Samples are added and the change in adsorbance at 260 nm is monitored on the Beckman DU-6 spectrophotometer in the time-drive mode. Trypsin is used as a positive control.

[1287] Additional assays based upon the release of acid-soluble peptides from casein or hemoglobin measured as adsorbance at 280 nm or calorimetrically using the Folin method are performed as described in Bergmeyer, et al., Methods of Enzymatic Analysis, 5 (1984). Other assays involve the solubilization of chromogenic substrates (Ward, Applied Science, 251-317 (1983)).

### Example 47

### Identifying Serine Protease Substrate Specificity

[1288] Methods known in the art or described herein may be used to determine the substrate specificity of the polypeptides of the present invention having serine protease activity. A preferred method of determining substrate specificity is by the use of positional scanning synthetic combinatorial libraries as described in GB 2 324 529 (incorporated herein in its entirety).

### Example 48

### Ligand Binding Assays

[1289] The following assay may be used to assess ligand binding activity of the polypeptides of the invention.

[1290] Ligand binding assays provide a direct method for ascertaining receptor pharmacology and are adaptable to a high throughput format. The purified ligand for a polypeptide is radiolabeled to high specific activity (50-2000 Ci/mmol) for binding studies. A determination is then made that the process of radiolabeling does not diminish the activity of the ligand towards its polypeptide. Assay conditions for buffers, ions, pH and other modulators such as nucleotides are optimized to establish a workable signal to noise ratio for both membrane and whole cell polypeptide sources. For these assays, specific polypeptide binding is defined as total associated radioactivity minus the radioactivity measured in the presence of an excess of unlabeled competing ligand. Where possible, more than one competing ligand is used to define residual nonspecific binding.

### Example 49

### Functional Assay in Xenopus Oocytes

[1291] Capped RNA transcripts from linearized plasmid templates encoding the polypeptides of the invention are synthesized in vitro with RNA polymerases in accordance with standard procedures. In vitro transcripts are suspended in water at a final concentration of 0.2 mg/mi. Ovarian lobes are removed from adult female toads, Stage V defolliculated oocytes are obtained, and RNA transcripts (10 ngloocytc) are injected in a 50 nl bolus using a microinjection apparatus. Two electrode voltage clamps are used to measure the currents from individual Xenopus oocytes in response polypeptides and polypeptide agonist exposure. Recordings are made in Ca2+ free Barth's medium at room temperature. The Xenopus system can be used to screen known ligands and tissue/cell extracts for activating ligands.

### Example 50

### Microphysiometric Assays

[1292] Activation of a wide variety of secondary messenger systems results in extrusion of small amounts of acid from a cell. The acid formed is largely as a result of the increased metabolic activity required to fuel the intracellular signaling process. The pH changes in the media surrounding the cell are very small but are detectable by the CYTOSENSOR microphysiometer (Molecular Devices Ltd., Menlo Park, Calif.). The CYTOSENSOR is thus capable of detecting the activation of polypeptide which is coupled to an energy utilizing intracellular signaling pathway.

### Example 51

### Extract/Cell Supernatant Screening

[1293] A large number of mammalian receptors exist for which there remains, as yet, no cognate activating ligand (agonist). Thus, active ligands for these receptors may not be included within the ligands banks as identified to date. Accordingly, the polypeptides of the invention can also be functionally screened (using calcium, cAMP, microphysiometer, oocyte electrophysiology, etc., functional screens) against tissue extracts to identify its natural ligands. Extracts that produce positive functional responses can be sequentially subfractionated until an activating ligand is isolated and identified.

### Example 52

### Calcium and cAMP Functional Assays

[1294] Seven transmembrane receptors which are expressed in HEK 293 cells have been shown to be coupled functionally to activation of PLC and calcium mobilization and/or cAMP stimulation or inhibition. Basal calcium levels in the HEK 293 cells in receptor-transfected or vector control cells were observed to be in the normal, 100 nM to 200 nM, range. HEK 293 cells expressing recombinant receptors are loaded with fura 2 and in a single day >150 selected ligands or tissue/cell extracts are evaluated for agonist induced calcium mobilization. Similarly, HEK 293 cells expressing recombinant receptors are evaluated for the stimulation or inhibition of cAMP production using standard cAMP quantitation assays. Agonists presenting a calcium transient or cAMP fluctuation are tested in vector control cells to determine if the response is unique to the transfected cells expressing receptor.

### Example 53

### ATP-Binding Assay

[1295] The following assay may be used to assess ATP-binding activity of polypeptides of the invention.

[1296] ATP-binding activity of the polypeptides of the invention may be detected using the ATP-binding assay described in U.S. Pat. No. 5,858,719, which is herein incorporated by reference in its entirety. Briefly, ATP-binding to polypeptides of the invention is measured via photoaffinity labeling with 8-azido-ATP in a competition assay. Reaction mixtures containing 1 mg/ml of the ABC transport protein of the present invention are incubated with varying concentrations of ATP, or the non-hydrolyzable ATP analog adenyl-5′-imidodiphosphate for 10 minutes at 4° C. A mixture of 8-azido-ATP (Sigma Chem. Corp., St. Louis, Mo.) plus 8-azido-ATP (³²P-ATP) (5 mCi/lmol, ICN, Irvine Calif.) is added to a final concentration of 100 μM and 0.5 ml aliquots are placed in the wells of a porcelain spot plate on ice. The plate is irradiated using a short wave 254 nm UV lamp at a distance of 2.5 cm from the plate for two one-minute intervals with a one-minute cooling interval in between. The reaction is stopped by addition of dithiothreitol to a final concentration of 2 mM. The incubations are subjected to SDS-PAGE electrophoresis, dried, and autoradiographed. Protein bands corresponding to the particular polypeptides of the invention are excised, and the radioactivity quantified. A decrease in radioactivity with increasing ATP or adenly-5′-imidodiphosphate provides a measure of ATP affinity to the polypeptides.

### Example 54

### Small Molecule Screening

[1297] This invention is particularly useful for screening therapeutic compounds by using the polypeptides of the invention, or binding fragments thereof, in any of a variety of drug screening techniques. The polypeptide or fragment employed in such a test may be affixed to a solid support, expressed on a cell surface, free in solution, or located intracellularly. One method of drug screening utilizes eukaryotic or prokaryotic host cells which are stably transformed with recombinant nucleic acids expressing the polypeptide or fragment. Drugs are screened against such transformed cells in competitive binding assays. One may measure, for example, the formulation of complexes between the agent being tested and polypeptide of the invention.

[1298] Thus, the present invention provides methods of screening for drugs or any other agents which affect activities mediated by the polypeptides of the invention. These methods comprise contacting such an agent with a polypeptide of the invention or fragment thereof and assaying for the presence of a complex between the agent and the polypeptide or fragment thereof, by methods well known in the art. In such a competitive binding assay, the agents to screen are typically labeled. Following incubation, free agent is separated from that present in bound form, and the amount of free or uncomptexed label is a measure of the ability of a particular agent to bind to the polypeptides of the invention.

[1299] Another technique for drug screening provides high throughput screening for compounds having suitable binding affinity to the polypeptides of the invention, and is described in great detail in European Patent Application 84/03564, published on Sep. 13, 1984, which is herein incorporated by reference in its entirety. Briefly stated, large numbers of different small molecule test compounds are synthesized on a solid substrate, such as plastic pins or some other surface. The test compounds are reacted with polypeptides of the invention and washed. Bound polypeptides are then detected by methods well known in the art. Purified polypeptides are coated directly onto plates for use in the aforementioned drug screening techniques. In addition, non-neutralizing antibodies may be used to capture the peptide and immobilize it on the solid support.

[1300] This invention also contemplates the use of competitive drug screening assays in which neutralizing antibodies capable of binding polypeptides of the invention specifically compete with a test compound for binding to the polypeptides or fragments thereof. In this manner, the antibodies are used to detect the presence of any peptide which shares one or more antigenic epitopes with a polypeptide of the invention.

### Example 55

### Phosphorylation Assay

[1301] In order to assay for phosphorylation activity of the polypeptides of the invention, a phosphorylation assay as described in U.S. Pat. No. 5,958,405 (which is herein incorporated by reference) is utilized. Briefly, phosphorylation activity may be measured by phosphorylation of a protein substrate using gamma-labeled ³²P-ATP and quantitation of the incorporated radioactivity using a gamma radioisotope counter. The polypeptides of the invention are incubated with the protein substrate, ³²P-ATP, and a kinase buffer. The ³²P incorporated into the substrate is then separated from free ³²P-ATP by electrophoresis, and the incorporated ³²P is counted and compared to a negative control. Radioactivity counts above the negative control are indicative of phosphorylation activity of the polypeptides of the invention.

### Example 56

### Detection of Phosphorylation Activity (Activation) of the Polypeptides of the Invention in the Presence ofPolypeptide Ligands

[1302] Methods known in the art or described herein may be used to determine the phosphorylation activity of the polypeptides of the invention. A preferred method of determining phosphorylation activity is by the use of the tyrosine phosphorylation assay as described in U.S. Pat. No. 5,817,471 (incorporated herein by reference).

### Example 57

### Identification of Signal Transduction Proteins that Interact With Polypeptides of the Present Invention

[1303] The purified polypeptides of the invention are research tools for the identification, characterization and purification of additional signal transduction pathway proteins or receptor proteins. Briefly, labeled polypeptides of the invention are useful as reagents for the purification of molecules with which it interacts. In one embodiment of affinity purification, polypeptides of the invention are covalently coupled to a chromatography column. Cell-free extract derived from putative target cells, such as carcinoma tissues, is passed over the column, and molecules with appropriate affinity bind to the polypeptides of the invention. The protein complex is recovered from the column, dissociated, and the recovered molecule subjected to N-terminal protein sequencing. This amino acid sequence is then used to identify the captured molecule or to design degenerate oligonucleotide probes for cloning the relevant gene from an appropriate cDNA library.

### Example 58

### IL-6 Bioassay

[1304] To test the proliferative effects of the polypeptides of the invention, the IL-6 Bioassay as described by Marz et al. is utilized (Proc. Natl. Acad. Sci., U.S.A., 95:3251-56 (1998), which is herein incorporated by reference). Briefly, IL-6 dependent B9 murine cells are washed three times in IL-6 free medium and plated at a concentration of 5,000 cells per well in 50 μl, and 50 μl of the IL-6-like polypeptide is added. After 68 hrs. at 37° C., the number of viable cells is measured by adding the tetrazolium salt thiazolyl blue (MTT) and incubating for a further 4 hrs. at 37° C. B9 cells are lysed by SDS and optical density is measured at 570 nm. Controls containing IL-6 (positive) and no cytokine (negative) are utilized. Enhanced proliferation in the test sample(s) relative to the negative control is indicative of proliferative effects mediated by polypeptides of the invention.

### Example 59

### Support of Chicken Embryo Neuron Survival

[1305] To test whether sympathetic neuronal cell viability is supported by polypeptides of the invention, the chicken embryo neuronal survival assay of Senaldi et al is utilized (Proc. Natl. Acad. Sci., U.S.A., 96:11458-63 (1998), which is herein incorporated by reference). Briefly, motor and sympathetic neurons are isolated from chicken embryos, resuspended in L15 medium (with 10% FCS, glucose, sodium selenite, progesterone, conalbumin, putrescine, and insulin; Life Technologies, Rockville, Md.) and Dulbecco's modified Eagles medium [with 10% FCS, glutamine, penicillin, and 25 mM Hepes buffer (pH 7.2); Life Technologies, Rockville, Md.], respectively, and incubated at 37 C in 5% CO₂ in the presence of different concentrations of the purified IL-6-like polypeptide, as well as a negative control lacking any cytokine. After 3 days, neuron survival is determined by evaluation of cellular morphology, and through the use of the colorimetric assay of Mosmann (Mosmann, T., J. Immunol. Methods, 65:55-63 (1983)). Enhanced neuronal cell viability as compared to the controls lacking cytokine is indicative of the ability of the inventive purified IL-6-like polypeptide(s) to enhance the survival of neuronal cells.

### Example 60

### Assay for Phosphatase Activity

[1306] The following assay may be used to assess serine/threonine phosphatase (PTPase) activity of the polypeptides of the invention.

[1307] In order to assay for serine/threonine phosphatase (PTPase) activity, assays can be utilized which are widely known to those skilled in the art. For example, the serine/threonine phosphatase (PSPase) activity is measured using a PSPase assay kit from New England Biolabs, Inc. Myelin basic protein (MyBP), a substrate for PSPase, is phosphorylated on serine and threonine residues with cAMP-dependent Protein Kinase in the presence of [³²P]ATP. Protein serine/threonine phosphatase activity is then determined by measuring the release of inorganic phosphate from 32P-labeled MyBP.

### Example 61

### Interaction of Serine/Threonine Phosphatases with Other Proteins

[1308] The polypeptides of the invention with serine/threonine phosphatase activity as determined in Example 60 are research tools for the identification, characterization and purification of additional interacting proteins or receptor proteins, or other signal transduction pathway proteins. Briefly, labeled polypeptide(s) of the invention is useful as a reagent for the purification of molecules with which it interacts. In one embodiment of affinity purification, polypeptide of the invention is covalently coupled to a chromatography column. Cell-free extract derived from putative target cells, such as neural or liver cells, is passed over the column, and molecules with appropriate affinity bind to the polypeptides of the invention. The polypeptides of the invention complex is recovered from the column, dissociated, and the recovered molecule subjected to N-terminal protein sequencing. This amino acid sequence is then used to identify the captured molecule or to design degenerate oligonucleotide probes for cloning the relevant gene from an appropriate cDNA library.

### Example 62

### Assaying for Heparanase Activity

[1309] In order to assay for heparanase activity of the polypeptides of the invention, the heparanase assay described by Vlodavsky et al is utilized (Vlodavsky, I., et al., Nat. Med., 5:793-802 (1999)). Briefly, cell lysates, conditioned media or intact cells (1×106 cells per 35-mm dish) are incubated for 18 hrs at 37° C., pH 6.2-6.6, with ³⁵S-labeled ECM or soluble ECM derived peak I proteoglycans. The incubation medium is centrifuged and the supernatant is analyzed by gel filtration on a Sepharose CL-6B column (0.9×30 cm). Fractions are eluted with PBS and their radioactivity is measured. Degradation fragments of heparan sulfate side chains are eluted from Sepharose 6B at 0.5<Kₐᵥ<0.8 (peak II). Each experiment is done at least three times. Degradation fragments corresponding to “peak II,” as described by Vlodavsky et al., is indicative of the activity of the polypeptides of the invention in cleaving heparan sulfate.

### Example 63

### Immobilization of Biomolecules

[1310] This example provides a method for the stabilization of polypeptides of the invention in non-host cell lipid bilayer constucts (see, e.g., Bieri et al., Nature Biotech 17:1105-1108 (1999), hereby incorporated by reference in its entirety herein) which can be adapted for the study of polypeptides of the invention in the various functional assays described above. Briefly, carbohydrate-specific chemistry for biotinylation is used to confine a biotin tag to the extracellular domain of the polypeptides of the invention, thus allowing uniform orientation upon immobilization. A 50 uM solution of polypeptides of the invention in washed membranes is incubated with 20 mM NaIO4 and 1.5 mg/ml (4 mM) BACH or 2 mg/ml (7.5 mM) biotin-hydrazide for 1 hr at room temperature (reaction volume, 150 ul). Then the sample is dialyzed (Pierce Slidealizer Cassett, 10 kDa cutoff; Pierce Chemical Co., Rockford Ill.) at 4C first for 5 h, exchanging the buffer after each hour, and finally for 12 h against 500 ml buffer R (0.15 M NaCl, 1 mM MgCl2, 10 mM sodium phosphate, pH7). Just before addition into a cuvette, the sample is diluted 1:5 in buffer ROG50 (Buffer R supplemented with 50 mM octylglucoside).

### Example 64

### TAQMAN

[1311] Quantitative PCR (QPCR). Total RNA from cells in culture are extracted by Trizol separation as recommended by the supplier (LifeTechnologies). (Total RNA is treated with DNase I (Life Technologies) to remove any contaminating genomic DNA before reverse transcription.) Total RNA (50 ng) is used in a one-step, 50 ul, RT-QPCR, consisting of Taqman Buffer A (Perkin-Elmer; 50 mM KCl/10 mM Tris, pH 8.3), 5.5 inM MgCl₂, 240 μM each dNTP, 0.4 units RNase inhibitor(Promega), 8%glycerol, 0.012% Tween-20, 0.05% gelatin, 0.3 uM primers, 0.1 uM probe, 0.025units Amplitaq Gold (Perkin-Elmer) and 2.5 units Superscript II reverse transcriptase (Life Technologies). As a control for genomic contamination, parallel reactions are setup without reverse transcriptase. The relative abundance of (unknown) and 18S RNAs are assessed by using the Applied Biosystems Prism 7700 Sequence Detection System (Livak, K. J., Flood, S. J., Marmaro, J., Giusti, W. & Deetz, K. (1995) PCR Methods Appl. 4, 357-362). Reactions are carried out at 48° C. for 30 min, 95° C. for 10 min, followed by 40 cycles of 95° C. for 15s, 60° C. for 1 min. Reactions are performed in triplicate.

[1312] Primers (f & r) and FRET probes sets are designed using Primer Express Software (Perkin-Elmer). Probes are labeled at the 5′-end with the reporter dye 6-FAM and on the 3′-end with the quencher dye TAMRA (Biosource International, Camarillo, Calif. or Perkin-Elmer).

### Example 65

### Assays for Metalloproteinase Activity

[1313] Metalloproteinases (EC 3.4.24.-) are peptide hydrolases which use metal ions, such as Zn²⁺, as the catalytic mechanism. Metalloproteinase activity of polypeptides of the present invention can be assayed according to the following methods.

[1314] Proteolysis of Alpha-2-Macroglobulin

[1315] To confirm protease activity, purified polypeptides of the invention are mixed with the substrate alpha-2-macroglobulin (0.2 unit/ml; Boehringer Mannheim, Germany) in 1× assay buffer (50 mM HEPES, pH 7.5, 0.2 M NaCl, 10 mM CaCl₂, 25 μM ZnCl₂ and 0.05% Brij-35) and incubated at 37° C. for 1-5 days. Trypsin is used as positive control. Negative controls contain only alpha-2-macroglobulin in assay buffer. The samples are collected and boiled in SDS-PAGE sample buffer containing 5% 2-mercaptoethanol for 5-min, then loaded onto 8% SDS-polyacrylamide gel. After electrophoresis the proteins are visualized by silver staining. Proteolysis is evident by the appearance of lower molecular weight bands as compared to the negative control.

[1316] Inhibition of Alpha-2-Macroglobulin Proteolysis by Inhibitors of Metalloproteinases

[1317] Known metalloproteinase inhibitors (metal chelators (EDTA, EGTA, AND HgCl₂), peptide metalloproteinase inhibitors (TIMP-1 and TIMP-2), and commercial small molecule MMP inhibitors) are used to characterize the proteolytic activity of polypeptides of the invention. The three synthetic MMP inhibitors used are: MMP inhibitor I, [IC₅₀=1.0 μM against MMP-1 and MMP-8; IC₅₀=30 μM against MMP-9; IC₅₀=150 μM against MMP-3]; MMP-3 (stromelysin-1) inhibitor I [IC₅₀=5 μM against MMP-3], and MMP-3 inhibitor II [Kᵢ=130 nM against MMP-3]; inhibitors available through Calbiochem, catalog # 444250, 444218, and 444225, respectively). Briefly, different concentrations of the small molecule MMP inhibitors are mixed with purified polypeptides of the invention (50 μg/ml) in 22.9 μl of 1× HEPES buffer (50 mM HEPES, pH 7.5, 0.2 M NaCl, 10 mM CaCl₂, 25 μM ZnCl₂ and 0.05% Brij-35) and incubated at room temperature (24° C.) for 2-hr, then 7.1 μl of substrate alpha-2-macroglobulin (0.2 unit/ml) is added and incubated at 37° C. for 20-hr. The reactions are stopped by adding 4× sample buffer and boiled immediately for 5 minutes. After SDS-PAGE, the protein bands are visualized by silver stain.

[1318] Synthetic Fluorogenic Peptide Substrates Cleavage Assay

[1319] The substrate specificity for polypeptides of the invention with demonstrated metalloproteinase activity can be detennined using synthetic fluorogenic peptide substrates (purchased from BACHEM Bioscience Inc). Test substrates include, M-1985, M-2225, M-2105, M-2110, and M-2255. The first four are MMP substrates and the last one is a substrate of tumor necrosis factor-α (TNF-α) converting enzyme (TACE). All the substrates are prepared in 1:1 dimethyl sulfoxide (DMSO) and water. The stock solutions are 50-500 μM. Fluorescent assays are performed by using a Perkin Elmer LS 50B luminescence spectrometer equipped with a constant temperature water bath. The excitation λ is 328 nm and the emission λ is 393 nm. Briefly, the assay is carried out by incubating 176 μl 1× HEPES buffer (0.2 M NaCl, 10 mM CaCl₂, 0.05% Brij-35 and 50 mM HEPES, pH 7.5) with 4 μl of substrate solution (50 μM) at 25° C. for 15 minutes, and then adding 20 μl of a purified polypeptide of the invention into the assay cuvett. The final concentration of substrate is 1 μM. Initial hydrolysis rates are monitored for 30-min.

### Example 66

### Characterization of the cDNA Contained in a Deposited Plasmid

[1320] The size of the cDNA insert contained in a deposited plasmid may be routinely determined using techniques known in the art, such as PCR amplification using synthetic primers hybridizable to the 3′ and 5′ ends of the cDNA sequence. For example, two primers of 17-30 nucleotides derived from each end of the cDNA (i.e., hybridizable to the absolute 5′ nucleotide or the 3′ nucleotide end of the sequence of SEQ ID NO:X, respectively) are synthesized and used to amplify the cDNA using the deposited cDNA plasmid as a template. The polymerase chain reaction is carried out under routine conditions, for instance, in 25 ul of reaction mixture with 0.5 ug of the above cDNA template. A convenient reaction mixture is 1.5-5 mM MgCl₂, 0.01% (w/v) gelatin, 20 uM each of dATP, w dCTP, dGTP, dTTP, 25 pmol of each primer and 0.25 Unit of Taq polymerase. Thirty five cycles of PCR (denaturation at 94 degree C for 1 min; annealing at 55 degree C for 1 min; elongation at 72 degree C for 1 min) are performed with a Perkin-Elmer Cetus automated thermal cycler. The amplified product is analyzed by agarose gel electrophoresis. The PCR product is verified to be the selected sequence by subeloning and sequencing the DNA product.

[1321] Use of the above methodologies and/or other methodologies known in the art generates fragments from the clone corresponding to the approximate fragments described in Table 8, below. Accordingly, Table 8 provides a physical characterization of certain clones encompassed by the invention. The first column provides the unique clone identifier, “Clone ID NO:Z”, for cDNA clones of the invention, as described in Table 1A. The second column provides the approximate size of the cDNA insert contained in the corresponding cDNA clone.

TABLE 8

| | cDNA |
|---|---|
| Clone ID | Insert |
| NO: Z | Size: |
| HE2KL28 | 900 |
| HHATR09 | 1100 |
| HS2SH04 | 1500 |
| HAPPY24 | 1300 |
| HBCBF11 | 1900 |
| HAPNO50 | 1100 |
| HKACI15 | 1900 |
| HMSNC17 | 4000 |
| HWLHY05 | 1000 |
| HLQBY46 | 1400 |
| HMWDB84 | 2700 |
| HFIHF63 | 2100 |
| HNGEO79 | 1700 |
| HHPDX35 | 2700 |
| HLDBM06 | 1400 |
| HEEAR06 | 900 |
| HWAEU35 | 1100 |
| HWBCQ57 | 1000 |

### Example 67

### Cell Attachment Assay

[1322] As Immunoglobulin (Ig) superfamily members are involved in cell-cell adhesion and cell-cell recognition, the cell attachment assay of Newham et al. is employed to identify cells involved in adherance to the translation products of the present invention (Newman, P., et al., J. Biol Chem., 272:19429-40 (1997), which is herein incorporated by reference). Briefly, Fc fusion proteins, as described in example 9, are generated and used to coat the wells of a 96 well plate. The wells are coated for 60 minutes at room temperature with 50 μls of the Fc-fusion protein diluted with HBS and blocked with heat-denatured bovine serum albumin, as described by Newham et al. Test cell lines are centrifuged at 1400× g for 3 minutes, washed in Dulbecco's minimal essential medium, 25 mM HEPES, resuspended at 1×10⁶/ml in 25 mM HEPES and allowed to recover at 37° C. for 10 minutes. 50 μl aliquots of cells are added to the Fc-fusion protein coated wells containing 50 μl of HBS, 0.2 mM MnCI₂, and incubated in a humidified atmosphere of 7% (v/v) CO₂ for 20 min at 37° C. Cells attached to untreated wells are fixed directly with 20 μl of 50% (v/v) glutaraldehyde to enable quantitation of cell number. Nonspecifically attached cells are aspirated from experimental wells, and the residual cells fixed with 5% (v/v) glutaraldehyde. Fixed cells are then washed three times with H₂O and stained for 60 min with 0.1% (w/v) crystal violet in 0.2 M MES, pH 6. Excess stain is removed with three water washes before cells are lysed with 10% (v/v) acetic acid, and the released stain is measured spectrophotometrically at A_{560 nm}. It would be clear to one skilled in the art that the above example may be modified in order to facilitate the testing of multiple and different cell lines for binding to the translation products of the clones of the present invention.

[1323] It will be clear that the invention may be practiced otherwise than as particularly described in the foregoing description and examples. Numerous modifications and variations of the present invention are possible in light of the above teachings and, therefore, are within the scope of the appended claims.

[1324] The entire disclosure of each document cited (including patents, patent applications, journal articles, abstracts, laboratory manuals, books, or other disclosures) in the Background of the Invention, Detailed Description, and Examples is hereby incorporated herein by reference. In addition, the CD-R copy of the sequence listing submitted herewith and the corresponding computer readable form are both incorporated herein by reference in their entireties. The specification and sequence listing of each of the following U.S. applications are herein incorporated by reference in their entirety: Application No. 60/179,065, filed on Jan. 31, 2000; Application No. 60/180,628, filed on Feb. 4, 2000; Application No. 60/214,886, filed on Jun. 28, 2000; Application No. 60/217,487, filed on Jul. 11, 2000; Application No. 60/225,758, filed on Aug. 14, 2000; Application No. 60/220,963, filed on Jul. 26, 2000; Application No. 60/217,496, filed on Jul. 11, 2000; Application No. 60/225,447, filed on Aug. 14, 2000; Application No. 60/218,290, filed on Jul. 14, 2000; Application No. 60/225,757, filed on Aug. 14, 2000; Application No. 60/226,868, filed on Aug. 22, 2000; Application No. 60/216,647, filed on Jul. 7, 2000; Application No. 60/225,267, filed on Aug. 14, 2000; Application No. 60/216,880, filed on Jul. 7, 2000; Application No. 601225,270, filed on Aug. 14, 2000; Application No. 60/251,869, filed on Dec. 8, 2000; Application No. 60/235,834, filed on Sep. 27, 2000; Application No. 60/234,274, filed on Sep. 21, 2000; Application No. 60/234,223, filed on Sep. 21, 2000; Application No. 60/228,924, filed on Aug. 30, 2000; Application No. 60/224,518, filed on Aug. 14, 2000; Application No. 60/236,369, filed on Sep. 29, 2000; Application No. 60/224,519, filed on Aug. 14, 2000; Application No. 60/220,964, filed on Jul. 26, 2000; Application No. 60/241,809, filed on Oct. 20, 2000; Application No. 60/249,299, filed on Nov. 17, 2000; Application No. 60/236,327, filed on Sep. 29, 2000; Application No. 60/241,785, filed on Oct. 20, 2000; Application No. 60/244,617, filed on Nov. 1, 2000; Application No. 60/225,268, filed on Aug. 14, 2000; Application No. 60/236,368, filed on Sep. 29, 2000; Application No. 60/251,856, filed on Dec. 8, 2000; Application No. 60/251,868, filed on Dec. 8, 2000; Application No. 601229,344, filed on Sep. 1, 2000; Application No. 60/234,997, filed on Sep. 25, 2000; Application No. 60/229,343, filed on Sep. 1, 2000; Application No. 60/229,345, filed on Sep. 1, 2000; Application No. 60/229,287, filed on Sep. 1, 2000; Application No. 60/229,513, filed on Sep. 5, 2000; Application No. 60/231,413, filed on Sep. 8, 2000; Application No. 60/229,509, filed on Sep. 5, 2000; Application No. 60/236,367, filed on Sep. 29, 2000; Application No. 60/237,039, filed on Oct. 2, 2000; Application No. 60/237,038, filed on Oct. 2, 2000; Application No. 60/236,370, filed on Sep. 29, 2000; Application No. 60/236,802, filed on Oct. 2, 2000; Application No. 60/237,037, filed on Oct. 2, 2000; Application No. 60/237,040, filed on Oct. 2, 2000; Application No. 60/240,960, filed on Oct. 20, 2000; Application No. 60/239,935, filed on Oct. 13, 2000; Application No. 60/239,937, filed on Oct. 13, 2000; Application No. 60/241,787, filed on Oct. 20, 2000; Application No. 60/246,474, filed on Nov. 8, 2000; Application No. 60/246,532, filed on Nov. 8, 2000; Application No. 60/249,216, filed on Nov. 17, 2000; Application No. 60/249,210, filed on Nov. 17, 2000; Application No. 60/226,681, filed on Aug. 22, 2000; Application No. 60/225,759, filed on Aug. 14, 2000; Application No. 60/225,213, filed on Aug. 14, 2000; Application No. 60/227,182, filed on Aug. 22, 2000; Application No. 60/225,214, filed on Aug. 14, 2000; Application No. 60/235,836, filed on Sep. 27, 2000; Application No. 60/230,438, filed on Sep. 6, 2000; Application No. 60/215,135, filed on Jun. 30, 2000; Application No. 60/225,266, filed on Aug. 14, 2000; Application No. 60/249,218, filed on Nov. 17, 2000; Application No. 60/249,208, filed on Nov. 17, 2000; Application No. 60/249,213, filed on Nov. 17, 2000; Application No. 60/249,212, filed on Nov. 17, 2000; Application No. 60/249,207, filed on Nov. 17, 2000; Application No. 60/249,245, filed on Nov. 17, 2000; Application No. 60/249,244, filed on Nov. 17, 2000; Application No. 60/249,217, filed on Nov. 17, 2000; Application No. 60/249,211, filed on Nov. 17, 2000; Application No. 60/249,215, filed on Nov. 17, 2000; Application No. 60/249,264, filed on Nov. 17, 2000; Application No. 60/249,214, filed on Nov. 17, 2000; Application No. 60/249,297, filed on Nov. 17, 2000; Application No. 60/232,400, filed on Sep. 14, 2000; Application No. 60/231,242, filed on Sep. 8, 2000; Application No. 60/232,081, filed on Sep. 8, 2000; Application No. 60/232,080, filed on Sep. 8, 2000; Application No. 60/231,414, filed on Sep. 8, 2000; Application No. 60/231,244, filed on Sep. 8, 2000; Application No. 60/233,064, filed on Sep. 14, 2000; Application No. 60/233,063, filed on Sep. 14, 2000; Application No. 60/232,397, filed on Sep. 14, 2000; Application No. 60/232,399, filed on Sep. 14, 2000; Application No. 60/232,401, filed on Sep. 14, 2000; Application No. 60/241,808, filed on Oct. 20, 2000; Application No. 60/241,826, filed on Oct. 20, 2000; Application No. 60/241,786, filed on Oct. 20, 2000; Application No. 60/241,221, filed on Oct. 20, 2000; Application No. 60/246,475, filed on Nov. 8, 2000; Application No. 60/231,243, filed on Sep. 8, 2000; Application No. 60/233,065, filed on Sep. 14, 2000; Application No. 60/232,398, filed on Sep. 14, 2000; Application No. 60/234,998, filed on Sep. 25, 2000; Application No. 60/246,477, filed on Nov. 8, 2000; Application No. 60/246,528, filed on Nov. 8, 2000; Application No. 60/246,525, filed on Nov. 8, 2000; Application No. 60/246,476, filed on Nov. 8, 2000; Application No. 60/246,526, filed on Nov. 8, 2000; Application No. 60/249,209, filed on Nov. 17, 2000; Application No. 60/246,527, filed on Nov. 8, 2000; Application No. 60/246,523, filed on Nov. 8, 2000; Application No. 60/246,524, filed on Nov. 8, 2000; Application No. 60/246,478, filed on Nov. 8, 2000; Application No. 60/246,609, filed on Nov. 8, 2000; Application No. 60/246,613, filed on Nov. 8, 2000; Application No. 60/249,300, filed on Nov. 17, 2000; Application No. 60/249,265, filed on Nov. 17, 2000; Application No. 60/246,610, filed on Nov. 8, 2000; Application No. 60/246,611, filed on Nov. 8, 2000; Application No. 60/230,437, filed on Sep. 6, 2000; Application No. 60/251,990, filed on Dec. 8, 2000; Application No. 60/251,988, filed on Dec. 5, 2000; Application No. 60/251,030, filed on Dec. 5, 2000; Application No. 60/251,479, filed on Dec. 6, 2000; Application No. 60/256,719, filed on Dec. 5, 2000; Application No. 60/250,160, filed on Dec. 1, 2000; Application No. 60/251,989, filed on Dec. 8, 2000; Application No. 60/250,391, filed on Dec. 1, 2000; Application No. 60/254,097, filed on Dec. 11, 2000; and Application No. 09/764,879, filed Jan. 17, 2001.

[1325] Moreover, the microfiche copy and the corresponding computer readable form of the Sequence Listing of U.S. application Ser. No. 60/179,065, and the hard copy of and the corresponding computer readable form of the Sequence Listing of U.S. application Ser. No. 60/180,628 are also incorporated herein by reference in their entireties.

The application's sequence listing, which the Patent Office published only in electronic form, follows.

SEQUENCE LISTING (288 sequences)

SEQ ID NO: 1 - DNA, 733 bp, Homo sapiens
gggatccggagcccaaatcttctgacaaaactcacacatgcccaccgtgcccagcacctgaattcgagggtgcaccgtcagtcttcctcttccccccaaaacccaaggacaccctcatgatctcccggactcctgaggtcacatgcgtggtggtggacgtaagccacgaagaccctgaggtcaagttcaactggtacgtggacggcgtggaggtgcataatgccaagacaaagccgcgggaggagcagtacaacagcacgtaccgtgtggtcagcgtcctcaccgtcctgcaccaggactggctgaatggcaaggagtacaagtgcaaggtctccaacaaagccctcccaacccccatcgagaaaaccatctccaaagccaaagggcagccccgagaaccacaggtgtacaccctgcccccatcccgggatgagctgaccaagaaccaggtcagcctgacctgcctggtcaaaggcttctatccaagcgacatcgccgtggagtgggagagcaatgggcagccggagaacaactacaagaccacgcctcccgtgctggactccgacggctccttcttcctctacagcaagctcaccgtggacaagagcaggtggcagcaggggaacgtcttctcatgctccgtgatgcatgaggctctgcacaaccactacacgcagaagagcctctccctgtctccgggtaaatgagtgcgacggccgcgactctagaggat

SEQ ID NO: 2 - protein, 5 aa, Homo sapiens
  misc_feature (3): Xaa equals any of the twenty naturally occurring L-amino acids
WSXWS

SEQ ID NO: 3 - DNA, 86 bp, Artificial Sequence
  Synthetic sequence with 4 tandem copies of the GAS binding site found in the IRF1 promoter (Rothman et al., Immunity 1:457-468 (1994)), 18 nucleotides complementary to the SV40 early promoter, and a Xho I restriction site.
gcgcctcgagatttccccgaaatctagatttccccgaaatgatttccccgaaatgatttccccgaaatatctgccatctcaattag

SEQ ID NO: 4 - DNA, 27 bp, Artificial Sequence
  Synthetic sequence complementary to the SV40 promoter; includes a Hind III restriction site.
gcggcaagctttttgcaaagcctaggc

SEQ ID NO: 5 - DNA, 271 bp, Artificial Sequence
  Synthetic promoter for use in biological assays; includes GAS binding sites found in the IRF1 promoter (Rothman et al., Immunity 1:457-468 (1994)).
ctcgagatttccccgaaatctagatttccccgaaatgatttccccgaaatgatttccccgaaatatctgccatctcaattagtcagcaaccatagtcccgcccctaactccgcccatcccgcccctaactccgcccagttccgcccattctccgccccatggctgactaattttttttatttatgcagaggccgaggccgcctcggcctctgagctattccagaagtagtgaggaggcttttttggaggcctaggcttttgcaaaaagctt

SEQ ID NO: 6 - DNA, 32 bp, Artificial Sequence
  Synthetic primer complementary to human genomic EGR-1 promoter sequence (Sakamoto et al., Oncogene 6:867-871 (1991)); includes a Xho I restriction site.
gcgctcgagggatgacagcgatagaaccccgg

SEQ ID NO: 7 - DNA, 31 bp, Artificial Sequence
  Synthetic primer complementary to human genomic EGR-1 promoter sequence (Sakamoto et al., Oncogene 6:867-871 (1991)); includes a Hind III restriction site.
gcgaagcttcgcgactccccggatccgcctc

SEQ ID NO: 8 - DNA, 12 bp, Homo sapiens
ggggactttccc

SEQ ID NO: 9 - DNA, 73 bp, Artificial Sequence
  Synthetic primer with 4 tandem copies of the NF-KB binding site (GGGGACTTTCCC), 18 nucleotides complementary to the 5' end of the SV40 early promoter sequence, and a XhoI restriction site.
gcggcctcgaggggactttcccggggactttccggggactttccgggactttccatcctgccatctcaattag

SEQ ID NO: 10 - DNA, 256 bp, Artificial Sequence
  Synthetic promoter for use in biological assays; includes NF-KB binding sites.
ctcgaggggactttcccggggactttccggggactttccgggactttccatctgccatctcaattagtcagcaaccatagtcccgcccctaactccgcccatcccgcccctaactccgcccagttccgcccattctccgccccatggctgactaattttttttatttatgcagaggccgaggccgcctcggcctctgagctattccagaagtagtgaggaggcttttttggaggcctaggcttttgcaaaaagctt

SEQ ID NO: 11 - DNA, 656 bp, Homo sapiens
caaaaaggacaagggaatttacagagcgatggtttctgacgatcgaggggaggacgacaccatattggacctcacgggtgacgccctggatgccatcttcaccgagttgggcaggattggtgccctctctgcaactccactgaaaatccaggggaccgaggaagggatccggatcttcagcaaggtcaagtactacaacgtgggagtacatgaaaaccacctggttccacaaagacaaacgtctggagagtggtgatcggataaggacgggcaccaccctggatgagatctggcttcacatcctggaccccaaagactcagacaagggcaaatacactctggaaatagctgcagggaaggaagtccggcagctctcaacagatctctcagggcaagcttttgaggatgcaatggctgaacaccagagactgaaaaccttggccatcatcgagaagaatcgtgccaaagtggtgagaggtctgccggatgtggccactatcatggaagataagaccctgtgcttgacttgcatcgtctcaggagaccccacccctgaaatctcttggctgaagaatgaccagcctgtcaccttccttgaccgataccgcatggaagtgagggggacagaggtcaccatcaccattgagaaggtcaac

SEQ ID NO: 12 - DNA, 579 bp, Homo sapiens
  misc_feature (534): n equals a,t,g, or c
actggcttctacttctgtgaggtgcagaacgtccatggcagcgagcgctcgggccctgtcagcgtggtagtcaaccgtaagaggccagggtggggtggcactggacacatcagagcaggaccagatggtggagccccaaggaagggttggggtcctgggcatgggaacttcaaggccacttacctgraggtggccttgagctcatgtcccagctctgcacacctgggcaatgctttgacctccctagttccctcctattttatatttggaagtttaaacttatgaaaagttgcagagaaagacaaataatgattatatacctttaacctagatttcccatttattaacattttggcacatttgcttaatctttctcgctgtctacacagacacacacacgcacatacatacatataaagtatggatatagacttgccatatatacaggtggcacttgtgtgtatgcacatccactctatgtggacatggggcacttatacatatatggacactctatatacatatggcatagtnatttagtatctacctacatatttatatcctgaagttgtcagacag

SEQ ID NO: 13 - DNA, 3580 bp, Homo sapiens
gggggacccgaaggcagctctcccaggctgcatgtggctgtggcccccaacacactgcgtctggagatccacggggctatgctggaggatgagggtgtctatatctgtgaggcctccaacaccctgggccaggcctcggcctcagctgacttcgacgctcaagctgtgaatgtgcaggtgtggcccggggctaccgtgcgggaggggcagctggtgaacctgacctgccttgtgtggaccactcacccggcccagctcacctacacatggtaccaggatgggcagcagcgcctggatgcccactccatccccctgcccaacgtcacagtcagggatgccacctcctaccgctgcggtgtgggcccccctggtcgggcaccccgcctctccagacctatcaccttggacgtcctctacgcgccccgcaacctgcgcctgacctacctcctggagagccatggcggcagctggccctggtactgtgcactgtggacagccgcccgcccgcccagctggccctcagccacgccggtcgcctcttggcctcctcgacagcagcctctgtccccaacaccctgcgcctggagctgcgagggccacagcccagggatgagggtttctacagctgctctgcccgcagccctctgggccaggccaacacgtccctggagctgcggctggagggtgtgcgggtgatcctggctccggaggctgccgtgcctgaaggtgcccccatcacagtgacctgtgcggaccctgctgcccacgcacccacactctatacttggtaccacaacggtcgttggctgcaggagggtccagctgcctcactctcattcctggtggccacgcgggctcatgcaggcgcctactcttgccaggcccaggatgcccagggcacccgcagctcccgtcctgctgccctgcaagtcctctatgcccctcaggaygctgtcctgtcctccttccgggactccagggccagatccatggctgtgatacagtgcactgtggacagtgagccacctgctgagctggccctatctcatgatggcaaggtgctggccacgagcagcggggtccacagcttggcatcagggacaggccatgtccaggtggcccgaaacgccctacggctgcaggtgcaagatgtgcctgcaggtgatgacacctatgtttgcacagcccaaaacttgctgggctcaatcagcaccatcgggcggttgcaggtagaaggtgcacgcgtggtggcagagcctggcctggacgtgcctgagggcgctgccctgaacctcagctgccgcctcctgggtggccctgggcctgtgggcaactccacctttgcatggttctggaatgaccggcggctgcacgcggagcctgtgcccactctcgccttcacccacgtggctcgtgctcaagctgggatgtaccactgcctggctgagctccccactggggctgctgcctctgctccagtcatgctccgtgtgctctaccctcccaagacgcccaccatgatggtcttcgtggagcctgagggtggcctccggggcatcctggattgccgagtggacagcgagccgctcgccagcctgactctccaccttggcagtcgactggtggcctccagtcagccccagggtgctcctgcagagccacacatccatgtcctggcttcccccaatgccctgagggtggacatcgaggcgctgaggcccagcgaccaaggggaatacatctgttctgcctcaaatgtcctgggctctgctctacctccacctactttggggtcagagccctgcaccgcctgcatcagttccagcagctgctctgggtcctgggactgctggtgggcctcctgctcctgctgttgggcctgggggcctgctacacctggagctcattgatcctgatgcagccacatgtgagacctcaacctgtgccccacccctgggctgaccgtggtgttgcctgccctccggaggagaaagtggccagaatctgtgatgactccagcctatgaatgtgaatgaggcagtgttgagtcctgcccgcctctacgaaaacagctctgtgacatctgactttttatgacctggccccaagcctcttgcccccccaaaaatgggtggtgagaggtctgcccaggagggtgttgaccctggaggacactgaagagcactgagctgatctcgctctctcttctctggatctcctcccttctctccatttctccctcaaaggaagccctgccctttcacatccttctcctcgaaagtcaccctggactttggttggattgcagcatcctgcatcctcagaggctcaccaaggcattctgtattcaacagagtatcagtcagcctgctctaacaagagaccaaatacagtgacttcaacatgatagaattttatttttctctcccacgctagtctggctgttacgatggtttatgatgttggggctcaggatccttctatcttccttttctctatccctaaaatgatgcctttgattgtgaggctcaccatggccccgctttgtccacatgccctccagccagaagaaggaagagtggaggtagaagcacacccatgcccatggtggacgcaactcagaagctgcacaggacttttccactcacttcccattggctggagtattgtcacatggctactgcaagctacaagggagactgggaaatgtagtttttattttgagtccagaggacatttggaattggacttccaaaggactcccaactgtgagctcatccctgagacttttgacattgttgggaatgccaccagcaggccatgttttgtctcagtgcccatctactgagggccagggtgtgcccctggccattctggttgtgggcttcctggaagaggtgatcactctcacactaagactgaggaaataaaaaaggtttggtgttttcctagggagagagcatgccaggcagtggagttgcctaagcagacatccttgtgccagatttggcccctgaaagaagagatgccctcattcccaccaccaccccccctacccccagggactgggtactaccttactggcmcttacaagagtggagggcagacacagatgttgtcagcatccttattcctgctccagatgcatctctgttcatgactgtgtgagctcctgtccttttcctggagaccctgtgtcgggctgttaaagagaatgagttaccaagaaggaatgacgtgcccctgcgaatcagggaccaacaggagagagctcttgagtgggctagtgactccccctgcagcctggtggagatggtgtgaggagcgaagagccctctgctctaggatttgggttgaaaaacagagagagaagtggggagttgccacaggagctaacacgctgggaggcagttgggggcgggtgaactttgtgtagccgaggccgcaccctccctcattccaggctcattcattttcatgctccattgccagactcttgctgggagcccgtccagaatgtcctcccaataaaactccatcctatgaaaaaaaaaaaaaaaaaaaaamaaaaaaaaaaaaa

SEQ ID NO: 14 - DNA, 457 bp, Homo sapiens
  misc_feature (14): n equals a,t,g, or c
  misc_feature (30): n equals a,t,g, or c
  misc_feature (47): n equals a,t,g, or c
  misc_feature (130): n equals a,t,g, or c
attaaaatggaagnaaaggcaagccaaatnaaattccagcctggatnaccaacccgtatccaagaacaaaaatgggaggaggtgcccccacattatggtgtgtaataggtaacatggggaaaatgcctantcctgtgttttggaaaagaagaaatagtgcccgtccctatttatttcctatatttagaaatttttcctcaaagaaatttcaattgtatctatgagatgggtttctaagtatcttattgtgtgttataagtgccttttaatatcatactaagtgtgagcttctggacattttcaagagcttacaaaaactaagtggcattgtatttttataaccccattgagaagactaagtaagaaatgaaatgtcctatcaattttattttgtcatgcttcaaacaataaagacatttctgctttaaaagaaaaaaaaaaaaaaaaaaaaaaaagg

SEQ ID NO: 15 - DNA, 1054 bp, Homo sapiens
  misc_feature (754): n equals a,t,g, or c
tttttttttttttttttttttttttagccaaggagagatttaattgtgtttgatattacacagcatgattgacacaagtgatgattccacagttcagataacaaaatatttacatgtattacaaagatgagatttctacatagagattatttctttaggggtctccaaggtaatgaattcaaatatggtggacctgtttggaagtttattagatccacataatttggaaaatatgaaagcactcagatcaatgctaataattactgaggcactaaaacattacattttaagttaaggtgagtgctgcaaagctctcagccattcctgatttgtttgtagctacacacctatactctccttcatcactctttactaagcttgttataaacaggttatggaaccctgtgccactttcctcaacagtgaaccttcttccttggactaattttccatctttgtaccagtaaaccgtgggtcttggagagccacgaactaagcactgaaaatatgctgctgtacctattggtgcataacagtcagaaatacctttgataaacctgggaggcccttccaccacctgaaattcaaaaaaactgtctgtgtagttgctctttaagaccaattcttccattaaactgcttaaagtcactttgcttttctttgctatcacagcaaatatttcagaatctcccatggtgaggaatccccgacagatagcctctcctacacaattcacagctctgcacctgtatgntgcactatcagaaagacagacatttcgaattttaagagtgtgacttcccttctcctcgctaatcacgtatttaatattatctggctcaatacacatatattctttataccacttaacttcgggagtcgggatccctatgactgaacatttgaatacagcatctgaattttctggaattttaaaatcacaaataggcattataaagcgaggaggcatttcaaatacttctaaatcaatttttagttctttgtcttctccctcccttgaatccatatttggatctacaaaattaaatggaag

SEQ ID NO: 16 - DNA, 726 bp, Homo sapiens
ctccatcgcccccccccaacaaaaaaaaaagtttcccatacactggcctgccccaaaacccactaacaattttagcaaaacagtccaggccaaagaggaagcatttcatgttcaataagaaacccagccattccgcatggctggttcctgagtggctctggtgatactctccagccacctgctgacattcagaatctcagacctcgggactgctgttgcggtaccgtgtgtctgacacctgccagcagccctttgctatctgcgcgcaggatgggggtgactgcccagacattcccgctagataggctctgatttccggggcagcctttcagatgcggcagacatacaacacctgtactttagagttttaagggaaaaaaaatcagaagtgctggttagatagtaaaaacttaggataacttagaaaggctagttttagcttcctttgtggctccctggtgcaaaacaattagcagttatgcaatggacctgattctagtttattctaattaagaagtgaggccgagtttgacttcgttcctgaatacaatcttgagtaactgggaaagtctgagtgaaaggatggcctcattctctttctaatcttgctggtttcaagattagaaaatggcattatttgatctgaaatgtttgagaagacacgaataaagttacttgggcagaaaaaaaaaaaaaaaaaaaaaaaaaaaaaaaaaaaaaaaaaaa

SEQ ID NO: 17 - DNA, 1083 bp, Homo sapiens
gcttttgcaaagctatttaggtgacactatagaaggtacgcctgcaggtaccggtccggaattcccgggtcgacccacgcgtccgcccacgcgtccggggtggcacatatacattgagggacctgaaagagaagtgattgtggacgatcagcaatcctgtgacattaacatgtgatgccactgggatcccacctcccacgatagcatggttaaagaaccacaagcgcatagaaaattctgactcactggaagttcgtattttgtctggaggtagcaaactccagattgcccggtctcagcattcagatagtggaaactatacatgtattgcttcaaatatggagggaaaagcccagaaatattactttctttcaattcaagttcctccaagtgttgctggtgctgaaattccaagtgatgtcagtgtccttctaggagaaaatgttgagctggtctgcaatgcaaatggcattcctactccacttattcaatggcttaaagatggaaagcccatagctagtggtgaaacagaaagaatccgagtgagtgcaaatggcagcacattaaacatttatggagctcttacatctgacacggggaaatacacatgtgttgctactaatcccgctggagaagaagaccgaatttttaacttgaatgtctatgttacacctacaattaggggtaataaagatgaagcagagaaactaatgactttagtggatacttcaataaatattgaatgcagagccacagggacgcctccaccacagataaactggctgaagaatggacttcctctgcctctctcctcccatatccggttactggcagcaggacaagttatcaggattgtgagagctcaggtgtctgatgtcgctgtgtatacttgtgtggcctccaacagagctggggtggataataagcattacaatcttcaagtgtttgcacctcgaaaaaaaaaaaaaaaaaaaaaaaaaaaaaaaaaaaaaaaaaaaaaaaaaaaaaaaaaaaagggcggccgctctagaggatccctcgaggggccccaagttacgcgtgcatgcgacgtcatagctctca

SEQ ID NO: 18 - DNA, 1325 bp, Homo sapiens
cccacgcgtccgcccacgcgtccgtgactgcagaacattctggaaactactcctgtgatgcagacaatggcctgggggcccagcacagtcatggagtgagtctcagggtcacagttccggtgtctcgccccgtcctcaccctcagggctcccggggcccaggctgtggtgggggacctgctggagcttcactgtgagtccctgagaggctccttcccgatcctgtactggttttatcacgaggatgacaccttggggaacatctcggcccactctggaggaggggcatccttcaacctctctctgactacagaacattctggaaactactcatgtgaggctgacaatggcctgggggcccagcacagtaaagtggtgacactcaatgttacaggaacttccaggaacagaacaggccttaccgctgcgggaatcacggggctggtgctcagcatcctcgtccttgctgctgctgctgctctgctgcattacgccagggcccgaaggaaaccaggaggactttctgccactggaacatctagtcacagtcctagtgagtgtcaggagccttcctcgtccaggccttccaggatagaccctcaagagcccactcactctaaaccactagccccaatggagctggagccaatgtacagcaatgtaaatcctggagtagcaacccgatttattcccagatctggagcatccagcatacaaaagaaaactcagctaattgtccaatgatgcatcaagagcatgaggaacttacagtcctctattcagaactgaagaagacacacccagacgactctgcaggggaggctagcagcagaggcagggcccatgaagaagatgatgaagaaagctatgagaatgtaccacgtgtattactggcctcagaccactagccccttacccagagtggcccacaggaaacagcctgcaccatttttttttctgttctctccaaccacacatcatccatctctccagactctgcctcctacgaggctgggctgcagggtatgtgaggctgagcaaaaggtctgcaaatctcccctgtgcctgatctgtgtgttccccaggaagagagcaggcagcctctgagcaagcactgtgttattttcacagtggagacacgtggcaaggcaggagggccctcagctcctagggctgtcgaatagaggaggagagagaaatggtctagccagggttacaagggcacaatcatgaccatttgatccaagtgtgaccgaaagctgttaatgtgctctctgtataaacaatttgctccaaaaaaaaaaaaaaaaaaaaaaaaaaaaaaaa

SEQ ID NO: 19 - DNA, 2013 bp, Homo sapiens
ggcacgagggcacccaggcctccatggtgtgcggagtgacccatgacccccgagtaaacatcaggtacatctgggagaaggacggggccaccctgggcacggagagccatcctcgtatccgcctggacagaaacggctccctgcacatctcacagacgtggtcgggagacatcggcacgtacacctgccgggtgatctcagcaggaggcaacgactctcgcagtgcccacctgcgagtcaggcaactgccccacgcgcccgagcacccagtggccactctcagcaccgtggaaaggcgagccatcaacctgacgtggaccaagccctttgatggcaacagccccctgatccgctacattctggagatgtcggagaacaatgccccctggactgtactcctggccagtgtggaccccaaagctacctcagtgacagtcaagggcctggttcctgcacgctcctaccagttccgtctttgtgccgtcaacgacgtggggaaaggacagttcagcaaagacaccgagagggtctccctccccgaggagccccccacggcccctccacagaacgtcatcgccagcggtcgaaccaaccagtccatcatgatccagtggcagccgcctcctgagagccaccagaatggaattctcaagggttacatcatcaggtactgcctggccgggctgcccgtggggtaccagtttaagaacatcacggatgctgatgtgaacaacctgctgctggaggatctcatcatttggaccaactacgagatcgaggtggctgcttacaacagcgctgggctgggggtctacagcagtaaagtcaccgagtggacgctgcagggagttcccacagtccctccgggcaatgtgcacgcggaagccaccaattccacgaccatccgcttcacctggaacgcccccagcccccagttcatcaacggcatcaaccagggctacaagctgatcgcctgggagccggaacaggaagaggaggttaccatggtgaccgcccggcctaactttcaagacagcatccacgtgggcttcgtgtctggcctgaagaagttcaccgagtacttcacctcagtgctgtgtttcaccacccccggggacgggccacgcagcaccccgcagctggtgcgcacccatgaggatggtaggcaccccccagccctgctctttctgcccccccccgcccaaggccaggctgggcgccccaggcagaagggtggcccaggcttgtctcccaggctgagatacccccagattaccacaggctatctcacagatggtggtctctctctggctctaactggccttggggggtgggggttccttttggggtgcagtgcctgggcccgtgggacacctgagcttcagtgagatcctggacacatcgctgaaggtcagctggcaagagccgggagagaaaaatggcatcctcacagggtaccggatctcctgggaggagtacaatcgaaccaacacccgtgtgacccactacctgcccaacgtgaccctggagtaccgtgtcacgggcctcaccgcgctcaccacctacaccatcgaggtggccgccatgacctcaaagggccagggccaagtgtccgcctccaccatctcctctggggtgcccccaggtaagtgcccactctcaaggcaggactctttgagttctcctgagcagcgtcccattcaagaggccccttgtcggctgggcgtggtggctcatgcctgtagtcccagcaccttgggaggctgaggcaggcgtatcacttgaggtcaggagttcgagaccagcctggccaacgtggtaaaaccctactaaaaatacaaaaattagccagctgtggtggtgcatgcttgtgatcccagttagttgggaggctgaggatggaagatcgcttgaacccaggaggtagaggttgcagcgagccgagatcacaccactgcactccagtctgggtgacagggccacatcgcgtctcaaaaaaaaaaaaaaaaaaaa

SEQ ID NO: 20 - DNA, 1684 bp, Homo sapiens
  misc_feature (11): n equals a,t,g, or c
  misc_feature (12): n equals a,t,g, or c
  misc_feature (15): n equals a,t,g, or c
  misc_feature (1576): n equals a,t,g, or c
  misc_feature (1671): n equals a,t,g, or c
ccttttagctnntgnaaaaggctatttaggtgacactatagaaggtacgcctgcaggtaccggtccggaattcccgggtcgacccacgcgtccgcccacgcgtccgyyyacgcgtccgcccacgcgtccgggctggccctgggcatgggccagggcctcaaagcctggccacggtaccgggttgtgggctccgcagacgctgggcagtacaacctggagatcacagatgctgagctctctgacgacgcctcttacgagtgccaggccacggaggccgccctgcgctctcggcgggccaaactcaccgtgctcatccccccagaggacaccaggattgacggaggccctgtgattctactgcaggcaggcaccccccacaacctcacatgccgggccttcaatgcgaagcctgctgccaccatcatctggttccgggacgggacgcagcaggagggcgctgtggccagcacggaattgctgaaggatgggaagagggagaccaccgtgagccaactgcttattaaccccacggacctggacatagggcgtgtcttcacttgccgaagcatgaacgaagccatccctagtggcaaggagacttccatcgagctggatgtgcaccaccctcctacagtgaccctgtccattgagccacagacggtgcaggagggtgagcgtgttgtctttacctgccaggccacagccaaccccgagatcttgggctacaggtgggccaaagggggtttcttgattgaagacgcccacgagagtcgctatgagacaaatgtggattattcctttttcacggagcctgtgtcttgtgaggttcacaacaaagtgggaagcaccaatgtcagcactttagtaaatgtccactttgctccccggattgtagttgaccccaaacccacaaccacagacattggctctgatgtgacccttacctgtgtctgggttgggaatccccccctcactctcacctggaccaaaaaggactcaaatatggggcccaggcctcctggctccccacccgaggctgctctctctgcccaggtcctgagtaacagcaaccagctgctgctgaagtcggtgactcaggcagacgctggcacctacacctgccgggccatcktgcctcgaatcggagtggctgagcgggaggtgccgctctatgtgaacgggccccccatcatctccagtgaggcagtgcagtatgctgtgaggggtgacggtggcaaggtggagtgtttcattgggagcacaccacccccagaccgcatagcatgggcctggaaggagaacttcttggaggtggggaccctggaacgctatacagtggagaggaccaactcaggcagtggggtgctatccacgctcaccatcaacaatgtcatggaggccgactttcagactcactacaactgcaccgcctggaacagcttcgggccaggcacagccatcatccagctggaagagcgagaggtgttacctgtgggcatcatagctggggccaccatcggcgcgagcatcctgctcatcttcttcttcatcgccttggtattcttcctctaccggngccgcaaaggcagtckcaaagacgtgaccctgaggaagctggatatcaaggtggagacagtgaaccgagagccacttacgatgcattctgaccgngaggatgacaccg

SEQ ID NO: 21 - DNA, 1407 bp, Homo sapiens
  misc_feature (1386): n equals a,t,g, or c
tgataaactgaggcagaagctacagacaaatgcccataatcgactggaattgcctcttatcatgctctctggccttccagacactgtttttgaaatcacagagttgcaatctctaaaacttgaaatcattaagaacgtaatgataccagccaccattgcacagctagacaatcttcaagagctctctctgcaccagtgttctgtcaaaatccacagtgcggcgctctctttcctgaaggaaaacctcaaggtcttgagcgtcaagtttgatgacatgagggaactccccccctggatgtatgggctccgaaatctggaagagctgtacctagttggctctctaagtcatgatatttccagaaatgtcacccttgagtctctgcgggatctcaaaagccttaaaattctctctatcaaaagcaacgtttccaaaatcccctcaggcagtggttgatgtttccagccatctccagaagatgtgcatacataatgatggcaccaagctggtgatgctcaacaacttaaagaagatgaccaatctgacagagctggagctggtccactgtgacctggagcgtattcctcatgctgtgttcagcctactcagcctccaggaattggacctgaaggaaaacaatctgaaatctatagaagaaatcgttagctttcagcacttaagaaagttgacagtgctaaaactgtggcataacagcatcacctacatcccagagcatataaagaaactcaccagcctggaacgcctgtcctttagtcacaataaaatagaggtgctgccttcccacctcttcctatgcaacaagatccgatacttggacttatcgtacaatgacattcgatttatcccccctgaaattggagttctacaaagtttacagtatttttccatcacatgtaacaaagtggaaagccttccagatgaactctacttctgcaagaaacttaaaactctgaagattggaaaaaacagcctatctgtactttcaccgaaaattggaaatttgctatttctttcctacttagatgtaaaaggtaatcactttgaaatcctccctcctgaactgggtgactgtcgggctctgaagcgagctggtttagttgtagaagatgctctgtttgaaactctgccttctgacgtccgggagcaaatgaaaacagaataacttatttttcgttaaagtttgactgaaacacgcttctaccaaatacagtataaataattaggtagtcttaatgcctttcctatttttttttccttttcacacaaaatgtacacaaagatcgcgtaaggagtatgtatttttaataaaaatttaattgtattttttcaatattaaatatttttgaaatttttaatttggttcttgnaaaacacaaagttttcctaat

SEQ ID NO: 22 - DNA, 1507 bp, Homo sapiens
taatacgactcactatagggaaagctggtacgcctgcaggtaccggtccggaattcccgggtcgacccacgcgtccgcctcaacattcctcattattgaccctctcttgggacttttgaagattcaagaaacacaagatctggatgctggcgattatacctgtgtagccatcaatgaggctggaagagcaactggcaagataactctggatgttggctcacctccagttttcatacaagaacctgctgatgtgtctatggaaattggctcaaatgtgacattaccttgytatgttcagggttatccagaaccaacaatcaaatggcgaagattagacaacatgccaattttctcaagacctttttcagttagttccatcagccaactaagaacaggagctctctttattttaagtaggttgaaggaaatatattttgtacgaatatgtacttttatgttatatatttatgytttatacataggtattgctatttaaaatagtatattaatcttgccaacacattttatgttcattgcattttactttgaaatagtactggcattttatattcgggaattgtcataaatgagttatattttattcaaatgtatgtcattaatttatcataagggcttatgaaacaatatgacttcttcatatcttaccatttcttattgcaaatagagtcatctgagcctttacatagataagtggtcacattaccttgattcttgtaacaattgttgtatagaaagataaaatattactattagttaactttatttattttgtcaaacagtacataacaacatagggatgccttggaatctcctttattaaaagctgtatccacctgaagcaaaagatccctgccacccccacaaaagtcaaatactttcttatctaaaaattttataagctattcagtattcagatatttggaagcaccttctattttttcaaataatgctaagaataattgcatggtgttaccagaggaggaaaagcatttagataattaattgcatttttaaaaataatgggatgtttggggtattttatagaaagcttttaatcagttactgctaagttaattattttaattatttttatttttatattttgggtgggtacgggttctmawwmwrwtgcccaggctggagtgcagtggcatgaacttggctcactgcaaactccacctcacaggttcaagcaattgtcctgcttcagcctcctgagtagctgggattacagtgtgaaccaccatacccagctaatttttgtatttttggtagagatagggttttaccatgttggccaggctggtctcgaattcttgacctcaaatgatccacccacatcgtcttcccaaagtactgggattgctgtcgtgaaccaccatgtctggcccaagtttattaacaatattaaatatacattggccacttaaamttccagatataaattaaattgtctaataacaaaaaaaaaaaaaaaaaggaaaaa

SEQ ID NO: 23 - DNA, 2232 bp, Homo sapiens
  misc_feature (2167): n equals a,t,g, or c
  misc_feature (2201): n equals a,t,g, or c
gagaaagagacaaagagcccctacaggaacgctttttccgaccacatttcctgcaggctcctggggatatggtagctcatgaggggcgcctctgtcggctggactgtaaggtgagtggtttaccgcccccggagctgacatggctactcaatggccaacctgtgctaccagatgcctcccacaagatgctggtcagggagaccggagtccactctctgctcattgacccactcactcagcgcgacgcagggacctataagtgcatcgctaccaacaaaaccgggcagaattcttttagtctggagctctctgtagtagccaaagaggtgaagaaagcacctgtgatcctggagaaactacagaactgcggtgttcccgaaggccaccccgtgagactggagtgccgcgtgataggcatgcccccacctgtgttctactggaagaaagacaatgagaccatcccttgcaccagagagaggatcagtatgcaccaggacacaacagggtatgcctgccttctcattcagccagccaagaaawcagacgctggatggtacacgttgtcagccaagaatgaagccggcatcgtgtcgtgcactgccaggctggatatatacgctcagtggcaccatcagatcccaccgsccatgtctgtccggcccagtggcagtcgctacggatctctcaccagtaaaggacttgacatattttctgccttttcctccatggaaagcacgatggtgtattcatgctcttctcggagtgtagtggagagtgatgaactttaagaatgtctaggtacctgctgtgtaagagagcggactgtggagggggaatgagaacaagccagacttggtggtttccaagcaaccgaagttgagtaagttcccacactgctggacctgtggcaaagagtgctttgaataagtcagctagggattcttgcagtctcagctgagggagaaaggtagggctgtgccttctaaagattccaacagagatgtgagaagataatacagatgaaccaaagatgtcacacagttgccatccactgctttgggaaaaaactagcatgctcccctgctccctgttgtgttagggatgtttaggtcatactaggagcaattaggagccatatgcctgggctgagaagagctaggcagtagtgaccttaggatatgactaactcaccaaacawtkycwwggagaaaggcggacaggtcaccatcacctttcatcgattacatgtatagcagtagttttggtgaattcaccaaatcagcttccacttagcattaggaggtcatgccatacaactcacgtatgcgggcaaacacttttgatttgcatatcctgggtgtactgagccacataataaggtgtcaaaatgtgcttgagattccaaaaacttgctgaaacacttgatattgcacagtgcacttattttgtggccaaagcatggccttaccagcttgtctgcactattttcttttgggtggtgactgtttttttctgactttgcatatccctagacactagaactaaaggattggtaataaaccaatcagaaagaaatcctctgtggggtcactttaaaaactactagcttcaactaccacttacaaaatgtgcaagagtcatcatttgcccataaaatacacctcatgggctcctacccctttccccaaaagtctgaaagtgtaggaggaaggaagagatacaaacaaggagaggaaatgatgggagagtgttgtttttgtcacttgccccagcagagcaggggttttggaaggagaggtctttaatagctttgaaatgctttgagatcattggtcaaattgcattttctatgtagagaatattctgctaggtggaaaagttgggagaaaggggaatatgcatctttaytctaatcaccaattcaaaccctgcctcttaaggaatttttagacttaagttcactgtgatatccctagtacctagaagagtacctagcacaaagtagacattcaataaatatttgctggttgaatgaatcttctgttattatgtctattataagataacctaatcttatattctgcaggaatatgccacccacacaccagtccaaacactgccctgggaatgctcatcacacataatttgctctaggtgtcaggaaatnaattgcagttctgtttccattcccgtgctggaancctgtgcttctttcaacacctccctgcatgt

SEQ ID NO: 24 - DNA, 1675 bp, Homo sapiens
ggcagttcctgagagaagaaccctgaggaacagacgttccctcgcggccctggcacctccaaccccagatatgctgctgctgctgctgctgcccctgctctgggggagggagagggtggaakgacagaagagtaaccggaaggattactcgctgacgatgcagagttccgtgaccgtgcaagagggcatgtgtgtccatgtgcgctgctccttctcctacccagtggacagccagactgactctgacccagttcatggctactggttccgggcagggaatgatataagctggaaggctccagtggccacaaacaacccagcttgggcagtgcaggaggaaactcgggaccgattccacctccttggggacccacagaccaaaaattgcaccctgagcatcagagatgccagaatgagtgatgcggggagatacttctttcgtatggagaaaggaaatataaaatggaattataaatatgaccagctctctgtgaacgtgacagccccagcaccacggcaccagcctcacctgtcaggtgaccttgcctggggccggcgtgaccacgaacaggaccatccaactcaatgtgtcctaccctcctcagaacttgactgtgactgtcttccaaggagaaggcacagcatccacagctctggggaacagctcatctctttcagtcctagagggccagtctctgcgcttggtctgtgctgttgacagcaatccccctgccaggctgagctggacctggaggagtctgaccctgtacccctcacagccctcaaaccctctggtactggagctgcaagtgcacctgggggatgaaggggaattcacctgtcgagctcaraactctytgggttccmagcacgkttccctgaacctctycctgcaacaggagtacmcaggcaaaatgaggcctgtatcaggagtgttgctgggggcggtcgggggagctggagccacagccctggtcttcctctccttctgtgtcatcttcattgtagtgasgtcctgcaggaagaaatcggcaaggccagcagcggacgtgggagacataggcatgaaggatgcaaacaccatcaggggctcagcctctcagggtaacctgactgagtcctgggcagatgataacccccgacaccatggcctggctgcccactcctcaggggaggaaagagagatccagtatgcacccctcagctttcataagggggagcctcaggacctatcaggtcaagaagccaccaacaatgagtactcagagatcaagatccccaagtaagaaaatgcagaggctcgggcttgtttgagggttcacgacccctccagcaaaggagtctgaggctgattccagtagaattagcagccctcaatgctgtgcaacaagacatcagaacttattcctcttgtctaactgaaaatgcatgcctgatgaccaaactctccctttccccatccaatcggtccacactccccgccctggcctctggtacccaccattctcctctgtacttctctaaggatgactactttagattccgaatatagtgagattgtaacgtgtttgtctctctgtgcctggcttatttcactcaacataacatcctctaagttcatctgtgttgtttccaatgacagagtaatgtactgaataattcaaaatagctaaaa

SEQ ID NO: 25 - DNA, 1942 bp, Homo sapiens
gacaacgtccagccgttccttcaagcactcccgctctgctgccgtcacctcagagttccacttggtgcctagccgcagcatgaatgggcagccactgacttgtgtggtgtcccatcctggcctgctccaggaccaaaggatcacccacatcctccacgtgtccttccttgctgaggcctctgtgaggggccttgaagaccaaaatctgtggcacattggcagagaaggagctatgctcaagtgcctgagtgaagggcagccccctccctcatacaactggacacggctggatgggcctctgcccagtggggtacgagtggatggggacactttgggctttcccccactgaccactgagcacagcggcatctacgtctgccatgtcagcaatgagttctcctcaagggattctcaggtcactgtggatgttcttgacccccaggaagactctgggaagcaggtggacctagtgtcagcctcggtggtggtggtgggtgtgatcgccgcactcttgttctgccttctggtggtggtggtggtgctcatgtcccgataccatcggcgcaaggcccagcagatgacccagaaatatgaggaggagctgaccctgaccagggagaactccatccggaggctgcattcccatcacacggaccccaggagccagccggaggagagtgtagggctgagagccgagggccaccctgatagtctcaaggacaacagtagctgctctgtgatgagtgaagagcccgagggccgcagttactccacgctgaccacggtgagggagatagaaacacagactgaactgctgtctccaggctctgggcgggccgaggaggaggaagatcaggatgaaggcatcaaacaggccatgaaccattttgttcaggagaatgggaccctacgggccaagcccacgggcaatggcatctacatcaatgggcggggacacctggtctgacccaggcctgcctcccttccctaggcctggctccttctgttgacatgggagattttagctcatcttgggggcctccttaaacacccccatttcttgcggaagatgctccccatcccactgactgcttgacctttacctccaacccttctgttcatcgggagggctccaccaattgagtctctcccaccatgcatgcaggtcactgtgtgtgtgcatgtgtgcctgtgtgagtgttgactgactgtgtgtgtgtggaggggtgactgtccgtggaggggtgactgtgtccgtggtgtgtattatgctgtcatatcagagtcaagtgaactgtggtgtatgtgccacgggatttgagtggttgcgtgggcaacactgtcagggtttggcgtgtgtgtcatgtggctgtgtgtgacctctgcctgaaaaagcaggtattttctcagaccccagagcagtattaatgatgcagaggttggaggagagaggtggagactgtggctcagacccaggtgtgcgggcatagctggagctggaatctgcctccggtgtgagggaacctgtctcctaccacttcggagccatgggggmaagtgtgaagcagccagtccctgggtcagccagaggcttgaactgttacagaagccctctgccctctggtggcctctgggcctgctgcatgtacatattttctgtaaatatacatgcgccgggagcttcttgcaggaatactgctccgaatcacttttaatttttttcttttttttttcttgccctttccattagttgtattttttatttatttttatttttatttttttttagagatggagtctcactatgttgctcaggctggccttgaactcctgggctcaagcaatcctcctgcctcagcctccctagtagctgggactttaagtgtacaccactgtgcctgctttgaatcctttacgaagagaaaaaaaaaaaaaaaaaaac

SEQ ID NO: 26 - DNA, 543 bp, Homo sapiens
  misc_feature (525): n equals a,t,g, or c
  misc_feature (530): n equals a,t,g, or c
gctgatgcaagggaagctggcttccaggtcaaggcctacactttcagtgaacccttccacctgattgtgtcctatgaactgtttccagcgccaattctcagagctgtaccctcagctgaaccccaagcaggaagccccatgaccctgagttgtcagacaaagttgcccctgcagaggtcagctgcccgcctcctcttctccttctacaaggatggaaggatagtgcaaagcagggggctctcctcagaattccagatccccacagcttcagaagatcactccgggtcatactggtgtgaggcagccactgaggacaaccaagtttggaaacagagcccccagctagagatcagagtgcagggtgcttccagctctgctgcacctcccacattgaatccagctcctcagaaatcagctgctccaggaactgctcctgaggaggcccctgggcctctgctccgcgcaaccccatcttctgaggatccaggcttttcttctcctctggggatgccagacctcatctgnatcancagatgggccttt

SEQ ID NO: 27 - DNA, 738 bp, Homo sapiens
  misc_feature (84): n equals a,t,g, or c
  misc_feature (696): n equals a,t,g, or c
tcgagtttttttttttttttttttttttttttttttttatgcataagaatacacataatgtatatttgtatgtgtatatactcntacataaacatatatgcataatataaatrtmcatatgtatgagaatgtttactatgtaacaaaattatatgatcacaaaacaagttatttcagaaagtgctcccaccaagcaagccactctgtgaattgccattgcctcctagtggctgctgcagttattacaggtgaaaatatctagctggaggcaaagggaggccttctgctggctggaaactgcccttaccaggactgaaaaagacatatttctgcacaaaattcacagcacccagcccaaagtctgaccagagtagtccccagggcatcagagtctaccatatcttcagaagactgacactcacctcggacctggaagaagagtgaggtgttggatgatccaagaacatttgtggcctcacagcggtagctgccagagtccccaaggcccagttctcggacctctaacttcagggagttggcctcagccttagcctggaaccgaccatgggatgggacctggggacccaggctggtggccaggargtgctccccatggaacaaggccagcaaggccagggggcggctgtccacagtgcagatgaacagagccatgtggccctggcccatgtctagganggctgacagctttggacggtccggggggatagagtacactca

SEQ ID NO: 28 - DNA, 1732 bp, Homo sapiens
  misc_feature (15): n equals a,t,g, or c
  misc_feature (957): n equals a,t,g, or c
  misc_feature (1017): n equals a,t,g, or c
actcactatagggcnattgggtacgggccccccctcgagttttttttttttttttttatgaaaaaaagttgtgaaaatttatttaggctgattttagtgtaacattgttttttataaaataattttataaaagagtccatcaagatattatatagaaaatgcacactaaggtaatatatatacacttcataaaaatagaatacatcttggcaattgcttagagtctattaccaccatgtacagtgtattgacgtgtaatatttatgttaatttgaacacatgagatttttaaaaaaccaaacctgtcccactggtatctttaaaaattgctttcattgacaggaaaataaacaaaattctggaacgtaaaagttatgaagctaactggatgaaagtttatattaaaatttttaaagttccatgccatgtacaactgacgtgagggcaaagcagtcttttttattattattatcataagtggttcagctgatctcacaaaatcactgaaaataatatccttgttctgaatgttcaatcaagataagcaccatttgggatcaaacaagccttatagtagctgkactatattttataaaatgagtggtgkttttcttcttaaaaatgaaaataggcaagtcctattataatgtatcaatacttacaaaaatctccgtaagttattttataagctttgatcaaaatacttagtaactaattttatgattctaaaaatagtcaaatgctcaaaaactctatttgattctgaattagytgctcttgcttttcgctgcttggtttggctttcaggaaaatgatcttaggtactacactactgtaaaccatcactgatatgtcctgttagatgttcagaataatctttgggaagtaactgctccagtgtaataaataaaataataagggacttttctagaccatacttcaagatatgaccatggngggatcatgaaaatacctcagaagtaccaaggaaggcacacaaaacagagtgtagcaccnttttcaagctgccaagattgcaactgttcaagagacagtaatctggaagggggcttgattgccatgattaatgcggtttaaatatgtggaataggctttggagagttccttagtatggataggcggrcmcagctatataaactatgaatgtgggtctgatattcaatggtcccattgcactgtagatgaggctcggaccctcatgcggtaggtctctgcttctcgtagtggtcgtgttgtatacaccactcctttcaggttttcatccctcaaggcaaaaggaacagtctgttcctcatctaccatgaggaaagttgtcctgggatgcatcactccatctttcatccaggtcactgttggtggtggaataccctgcacctcacactccaaggagatactcttccctcgggtcacaataatttcagtagggtggctgccactgttggttatggttggtctaatgtaaacttgcagattgtattctttctttgcagtcccagcaacattcgacgccacacatgaatagagtgctgcatcagacttttcagcaattgaaatttgtaattgcctgcccccagataaaattctaactcgccccatggaatcagtcagcactggagagcctttcttcttccagatgagatttgggggtggaataccacttgattcacacaacagactaatgagattcccttcaatgaccggacgcgtgggc

SEQ ID NO: 29 - DNA, 1131 bp, Homo sapiens
ggcacgagccgcgctcctgcctcctgccccagcaggcaggaagaatgggggctgacctctacctcggtgctcaagagagaggccccagctggcagggacccagaagagcctggagatgttggtgctggagaccccaactctgatcagggactccctgtgctgatgactcagggaacagaggacctaaagggcccaggacaaaggtgtgagaatgagccactgctggaccctgttggccctgagcctctggggcctgagagtcagtcagggaagggagacatggtggagatggccacacggtttgggtccaccctgcagctagacctggaaaaggggaaggagagtctgttggagaagaggctggtggcagaggaggaagaggacgaagaggaggtggaagaggatggccccagcagctgctcggaggacgattacagtgagctgctgcaggagatcacagacaacctgacgaagaaggagattcagatagagaagatccatttggacacatcctccttcgtggaggagctgcctggagagaaggaccttgcccacgtggtagagatctatgactttgaaccagcgctcaagacggaggacctgctggcaacgttttctgagttccaagagaaggggttcaggattcagtgggtggatgatactcacgcactcggcatctttccctgcctggcctcagctgcggaagccctgacccgggagttctcggtgctcaagatccggcccctcacacagggaaccaagcagtcaaagctcaaagccttgcagaggccaaaactcctgcgtctggtgaaggagaggccacagacaaatgcgactgtggcccggcggctggtggcccgggccctgggactccaacacaaaaagaaagagcggcctgctgtccggggtccgctgccgccctgaggcctggagacccaactggcctggatctgcgtcccgacgtagctggcgcccccaacaccataagccttcacagacgccagagcagccccgcaccaccctcgagcttcaccatggggtgtggtgggctttagtttagtcccagaaatggagaaaaaataaaaactcacgttgttctaatgtgaaaaaaaaaaaaaaaaaaaaaaaaaa

SEQ ID NO: 30 - DNA, 1812 bp, Homo sapiens
ccacgcgtccgagatcgcgagctgtgtctgttcccaggagtccttcggcggctgttgtgtcagtggcctgatcgcgatggggacaaaggcgcaagtcgagaggaaactgttgtgcctcttcatattggcgatcctgttgtctgtgaagttgtcctgtgcctactcgggcttttcttctccccgtgtggagtggaagtttgaccaaggagacaccaccagactcgtttgctataataacaagatcacagcttcctatgaggaccgggtgaccttcttgccaactggtatcaccttcaagtccgtgacacgggaagacactgggacatacacttgtatggtctctgaggaaggcggcaacagctatggggaggtcaaggtcaagctcatcgtgcttgtgcctccatccaagcctacagttaacatcccctcctctgccaccattgggaaccgggcagtgctgacatgctcagaacaagatggttccccaccttctgaatacacctggttcaaagatgggatagtgatgcctacgaatcccaaaagcacccgtgccttcagcaactcttcctatgtcctgaatcccacaacaggagagctggtctttgatcccctgtcagcctctgatactggagaatacagctgtgaggcacggaatgggtatgggacacccatgacttcaaatgctgtgcgcatggaagctgtggagcggaatgtgggggtcatcgtggcagccgtccttgtaaccctgattctcctgggaatcttggtttttggcatctggtttgcctatagccgaggccactttgacagaacaaagaaagggacttcgagtaagaaggtgatttacagccagcctagtgcccgaagtgaaggagaattcaaacagacctcgtcattcctggtgtgagcctggtcggctcaccgcctatcatctgcatttgccttactcaggtgctaccggactctggcccctgatgtctgtagtttcacaggatgccttatttgtcttctacaccccacagggccccctacttcttcggatgtgtttttaataatgtcagctatgtgccccatcctccttcatgccctccctccctttcctaccactgctgagtggcctggaacttgtttaaagtgtttattccccatttctttgagggatcaggaaggaatcctgggtatgccattgacttcccttctaagtagacagcaaaaatggcgggggtcgcaggaatctgcactcaactgcccacctggctggcagggatctttgaataggtatcttgagcttggttctgggctctttccttgtgtactgacgaccagggccagctgttctagagcgggaattagaggctagagcggctgaaatggttgtttggtgatgacactggggtccttccatctctggggcccactctcttctgtcttcccatgggaagtgccactgggatccctctgccctgtcctcctgaatacaagctgactgacattgactgtgtctgtggaaaatgggagctcctgttgtggagagcatagtaaattttcagagaacttgaagccaaaaggatttaaaaccgctgctctaaagaaaagaaaactggaggctgggcgcagtggctcacgcctataatcccagaggctgaggcaggcggatcacctgaggtcaggagttcaggatcagcctgaccaacatggagaaaccctactggaaatgcaaagttagccaggcatggtggtgcatgcctgtaatcccagctgctcaggagcctggcaacaagagcaaaactccagctcaaaaaaaaaaaaaaa

SEQ ID NO: 31 - DNA, 4047 bp, Homo sapiens
gtggmattgtgagcggataacaatttcacacaggaaacagctatgaccatgattacgccaagctcgaaattaaccctcactaaagggaacaaaagctggagctccaccgcggtggcggccgctctagaactagtggatcccccgggctgcaggaattccctttcaagtcaacttcagatgtcactgacaaacttactatagactggacatatcgccctcccagcagcagccacacagtatcaatatttcattatcagtctttccagtacccaaccacagcaggcacatttcgggatcggatttcctgggttggaaatgtatacaaaggggatgcatctataagtataagcaaccctaccataaaggacaatgggacattcagctgtgctgtgaagaatcccccagatgtgcatcataatattcccatgacagagctaacagtcacagaaaggggttttggcaccatgctttcctctgtggcccttctttccatccttgkctttgtgccctcagccgtggtggttgctctgctgctggtgagaatggggaggaaggctgctgggctgaagaagaggagcaggtctggctataagaagtcatctattgaggtttccgatgacactgatcaggaggaggaagargcgtgtatggcgaggctttgtgtccgttgcgctgagtgcctggattcagactatgaagagacatattgatgaaagtctgtatgacacaagaagagtcacctaaagacaggaaacatcccattccactggcagctaaagcctgtcagagaaagtggagctggcctggaccatagcgatggacaatcctggagatcatcagtaaagactttaggaaccacttatttattgaataaatgttcttgttgtatttataaactgttcaggaastctcataagagactcatgacttcccctttcaatgaattatgctgtaattgaatgaagaaattcttttcctgagcaaaaagatactttttgattcatctttgctctggaatgtattacatgttttcttccaactgtttgaaggagaattttgaatgtttgccacaccgctgatacccaaataattttttaaatgaagtggagcttgtggcttcctgatgtgtcaccagacaaaatattcgcttgggatatgtattctttgttttttgctccatgtacactttcagctgtgagttagtatagggcgtatacttaccggtttaatgacctcaacctcagttgtgtttggataacttagggtgtatacccttagtttccttagagttggtaggatcaagtcattggtttgctttgactgggtttttaaagtattaagtacagtgtcatcaatttacagttaaggaaaggaatcgtgaagtagaaaaattattttctttagtcttgctggtacaatttgggctaaggagtctttgttattttctgtcttgcttttttttttttttttttttttttgaggcagagtctcactctgtcgccaggctggagtgcagtggtgtgatcttggctcactgcaacctctgcctcctgggttcaagcgattcttgkgcctcagcctctcgagtagctgggattacaggcatgcgccaccacacccagctaatttttgtgtttttagtagagacggggtttcaccattttggccaggatggtctcaatcccctgacctcgtgatccacctgcctcggcctcccaaagtgttgggattacaggcatgagccactgtgcttggcctgttattttattttcttataactacaacttttcttcttgaattttcaggtcagaggcaagaaaaactctttacaggtttttagtggggggcttatggagtatttcaggagttctttgcaaattaaatcatcttttcacttgtattgtttttcaaaactttgttgatttctaaaatgtgccaactgtgagtaaactatggtatttgcaagtggtttttacataatatttgagatgaggaagtgagattgtgcatgacatacttctcctttgtattctctcagtgccttacagcaggttactccattctgctatgacaacttgtttcaaatgttaatttacataggattttttataagccattaaggcatatgtatagtatatcagtaaagatggatggtgcatatataaatagtcttctgtaatagtgattggatttacttctcaattatgagagacaaaattatcccctcacctgkctctattctttcaacaggttgatcccttttcatgatttttcattaggtggttcaggaagtttccatattacagcgcttcagactgtatatgttagtttaaaaatcacttttctctctctcaacttctttcttttttttttgaagacttaatttaaaaaatttgggttgttagatccgtatcatakatttggcctagcctcttctgttaacctagtccacagatgagcgaatctggttagttgaaggacattgtgatttgactctggtcacgcgaggaagtagaagggcaaagacaggaccggcagtttacatttccagtggttaaacctcacggtactttgggactgcttgttaacttttgtggttgtctgaggccaatctaacgtgaccatttctgacacctcaacagagagaggaaagcaacttgagcaatgagagtaaataacttgggctctcagagatttgaakatagagatctcattgtgagggggactattttgcaggtccwyatttctccaagaaagagatggtgttacaggaacccactgaaagccatatcccattaaatgaggaactaattttggctgggccttcttgtaatgtcctcgcaggtgtgttgtgaagattaatgcagggtagtatgtttgtagattgacacctagtctaaacttgaggtaattggtgctctgtgaatactcagtcgtgttcttttatagccttaatcatgatttgaactagtcccttgctttttaaatgactgaatgaagtccttcgtggtaagggagtacgttgataacttagtttactatatgggtttgtggtcgcatcccagtcatcagctgctatcattttccttcttcatcccttatactgagatttgggttacagctttttattcttcgaaggatcacaaagcagtgtacagacacctgccttctttaaggatgaaaggaagataaagtggtctttttttgtttacttatttgtttcacctcttgtttgagtaacttctaaggtgctattctctctctctttttgctaccccatgagctcttgtcacagccatggaaaccagcctcgtttagaaagggaacttagttcagaaggggttaaaagccttccagaatttttctttagctgctgaagtttttacatgtggttacatgactttaagttttatgcattacgctcttaattctattacaaaatgtggactcaccaattgctttgtgttttccatgtgacctgttacttcaggctacttggggaacatcttagtcctctgtagctcctgaacccagcactggtgcttcaagagagaaggtagcacgtctttgttcaaaacaaaacaaaacgacacttctggaggccacatcctgaatatgaatgttctactaagtcactcagttatggttctaaagggaaactgtaagaagacccacaaggagtggaccaagactattatttaattgcacaacttgaaactttgctgccagaagaggcagctccattcctttgactccagtgttgggctgttaactgctgcacctcattgcctttttttgtttttgtttttgttttgtaggagggtaggcactgttgggccatatgcacaaatattgtaactcttggtatctttactgcatcatagtcaataaacttctttgtaccctttggcwaaaaaaaaaaaaaaaaaaaaaaaaaaaaaaaaaaaaaaaaaaaaaaaaggaattcgatatcaagcttatcgataccgtcgacctcgagggggggcccrgtacccaattcgccctatagtgagtcgtgtcccctcc

SEQ ID NO: 32 - DNA, 559 bp, Homo sapiens
  misc_feature (525): n equals a,t,g, or c
  misc_feature (556): n equals a,t,g, or c
  misc_feature (557): n equals a,t,g, or c
  misc_feature (558): n equals a,t,g, or c
gggtcgacccacgcgtccggatccccacccctgcccacccctgccctacgctggaccaaggacttcgtccccctggggaatggccccaccctctccctgagctccctcaccttcgactctgcgggcacctacgtctgtgaggcctccatgcccacggtccccctcctcagccgtacccagagcttcaagctgctggtccaagggccacctcaattaagtgcagaagagactcagccccagacagagggcggctggagggaaggagatgaagttaggctggtgtgctctgcccgcggttacccggagcccaaactyagctggagccaattgggtggcagcccagcagaaccggcctcactgggcagggctgggtgagcagytccctgaccytgaagktgaccagcgccytgagcagagaaggcgtctyctgcgaggyttccaacacccasgggaagaagcagcatgtyttccatttggstctgtgggcccccagayttcccaggccggcgtggctgtcatggccgnggccgtcagcgtgggcctcttgcttctcgcnnng

SEQ ID NO: 33 - DNA, 1640 bp, Homo sapiens
gagccggtttcttgaagcagctggaagtcctggatagttcccacctgaaagtctgtttgcaaaggcaatgcgcactcaggcaccagagggcagaggggctcaagttccagggttttaaggtgcttggaactcccaggagcctggcaaaccttcatccagaacctcttcctcaagcaagacaaaaagctgctaagcactgctccctccgtctctgtgaagagaccagcttctaacagacggtgccgggctgaccccccatcatgccaggctggctcaccctccccacactctgccgcttccttctttgggccttcaccatcttccacaaagcccaaggagacccagcatcccacccgggcccccactacctcctgccccccatccacgaggtcattcactctcatcgtggggccacggccacgctgccctgcgtcctgggcaccacgcctcccagctacaaggtgcgctggagcaaggtggagcctggggagctccgggaaacgctgatcctcatcaccaacggactgcacgcccgggggtatgggcccctgggagggcgcgccaggatgcggagggggcatcgactagacgcctccctggtcatcgcgggcgtgcgcctggaggacgagggccggtaccgctgcgagctcatcaacggcatcgaggacgagagcgtggcgctgaccttgagcttggagggtgtggtgtttccgtaccaacccagccggggccggtaccagttcaattactacgaggcgaagcaggcgtgcgaggagcaggacggacgcctggccacctactcccagctctaccaggcttggaccgagggtctggactggtgtaacgcgggctggctgctcgagggctccgtgcgctaccctgtgctcaccgcacgcgccccgtgcggcggccgaggccggcccgggatccgcagctacggaccccgcgaccggatgcgcgaccgctacgacgccttctgcttcacctccgcgctggcggccaagtgttcttcgtgcccggcggctgacgctgtctgaagcccacgcggcgtgccggcgacgcggcgccgtggtggccaaggttgggcacctctacgccgcctggaagttttcggggctagaccagtgcgacggcggctggctggctgacggcagtgtgcgcttcccaatcaccacgccgaggccgcgctgcggggggctcccggatcccggagtgcgcagtttcggcttccccaggccccaacaggcagcctatgggacctactgctacgccgagaattaggcgcccaccgtgtcccctccagcgcgcgcgaagaagcttgggagtcgtggcgggggtctctcgccacccctttccggagagcctcccctccctccagacccggagcggcctctccagacctgccttcccagccgggggctgcgggcctcggaccccggctggcccggcggcggggaggggaggcgggggcgcctccggcggcgagatgcagaggtgaccctcggacccgctgccgttcgcgaaccctagcagaggactcagccaccgccgaggggagggtgaggcggccgggggcattaactgacctctgagtacagcaataaaataacctggggatctttaaaaaaaaaaaaaaaaaa

SEQ ID NO: 34 - DNA, 1018 bp, Homo sapiens
ccttttttttttttttttggcttgcaccaatttgtgagacccaagtatctcctacctagaaaaaaaacacactaaacagtaaatgattaccaacctatttggaacaaatctcaattaattaacatatacttcaaggagaagacttaacaaaatcttacttttcattcttaatagctctttccataaaaatgttccacaagtgtatcaaattagtcctaacaactactgttaagtgattaatgaaacaggagtgacaggagtgaatttaataatagcaataaatacagatgggactacataaattgtggaggtcctgatgcaaaactctctctgtattcgatggcatctcagctttctcatagagctgtttcactgtgagggtctttatccttcatgcagagctttaacaatcaggtgaaagtccaagctctccgttttcagagatgactttgcaatacaactgtaggttccgttgtcaggcttctcgactttggtgattgacagctgaaaagactcacttgtctgttggatttggtgacggcttttctctaaatcgaggagactactgtttttgtaccacatcatttgagcctgggggttggctttcacattgcaaaccaacttcacattactgccttcctcaactgtttggaagtcgtttccacttaggagaggaggaaaagtaacattcagcaccaccgaaacggacacggactgatccctccccagcctgcaggtaaagctgattccgttgtcattttcactgatggaagagacacagacagagctggaattgattttgtttccagatttcaaatccactctcccctcctctcggtaccagagcagttcttcctctctggtgtggttttgaacagcacatatcagagatgcttgggagccaggtgtagtatccaggatatagttctcagttttaccattcacagttaaaacagaacctcttgagctctgagaagctgacttccttggccaactgttcctctgcccggacgcgtgg

SEQ ID NO: 35 - DNA, 643 bp, Homo sapiens
  misc_feature (590): n equals a,t,g, or c
  misc_feature (612): n equals a,t,g, or c
  misc_feature (631): n equals a,t,g, or c
  misc_feature (633): n equals a,t,g, or c
  misc_feature (635): n equals a,t,g, or c
gccgaataccaggatacaacggtttgaggttctcaagaacggtaccttagtgatacggaaggttcaagtacaagatcgaggccagtatatgtgcaccgccagcaacctgcacggcctggacaggatggtggtcttgctttcggtcaccgtgcagcaacctcaaatcctagcctcccactaccaggacgtcactgtctacctgggagacaccattgcaatggagtgtctggccaaagggaccccagccccccaaatttcctggatcttccctgacaggagggtgtggcaaactgtgtcccccgtggagggccgcatcaccctgcacgaaaaccggaccctttccatcaaggaggcgtccttctcagacagaggcgtctataagtgcgtggccagcaatgcagccggggcggacagcctggccatccgcctgcacgtggcggcactgcccccgttatccaccaggagaagctggagaacatctcgctgcccccggggctcagcattcacattcactgcactgccaaggctgcgcccctgcccagcgtgccgctgggtgctcggggacggtaccccagatccgcccctcgcantttcctccccgggaaacttggnttggttttccccaacgggncncntttacatt

SEQ ID NO: 36 - DNA, 791 bp, Homo sapiens
  misc_feature (694): n equals a,t,g, or c
  misc_feature (764): n equals a,t,g, or c
  misc_feature (778): n equals a,t,g, or c
  misc_feature (788): n equals a,t,g, or c
  misc_feature (789): n equals a,t,g, or c
atcgccagctcgaaattaaccctcactaaagggaacaaaagctggagctccaccgcggtggcggccgctctagaactagtggatcccccgggctgcaggaattcggcacgagcggcacgagctcgtgccgaattcggcacgagtggagacgccgtgactttgaagtgtaacttcaagacagatgggcgcatgcgggagatcgtgtggtaccgggtgacggatggtggcaccatcaagcaaaagatcttcaccttcgacgccatgttctccaccaactactcacacatggagaactaccgcaagcgagaggacctggtgtaccagtccactgtgaggctgcccgaggtccggatctcagacaatggtccctatgagtgccatgtgggcatctacgaccgcgccaccagggagaaggtggtcctggcatcaggcaacatcttcctcaacgtcatggctcctcccacctccattgaagtggtggctgctgacacaccagcccccttcagccgctaccaagcccagaacttcacgctggtctgcatcgtgtctggaggaaaaccagcacccatgccaaccacagagaacataccagagacggtcgtgagccgtgagtttccccgctgggtccacagcgccgagcccacctacttcctgcgccacaagccgaccccgagcagtgacggcactgtggaantacgtgccctgstaactggaaccttaacccacagawcgacaacgaggccttttaacttgsaggtcaagcncccaatttttcaangcccatcagnnaa

SEQ ID NO: 37 - DNA, 1481 bp, Homo sapiens
attccctggcagagtaaaaaggtagggacctcagtgatctcctgtgatctgcaaagtgcaaaccataggcatccagcttcccatgaaaggggattcatggggaagggagagcattactcactcagggaaatgggggaagggatgcccaaatagttctgcatctttattctgagtattgttctacagcttttctgaatgtgttgctttcccgtaaagaggaagatgactacacttaagagaggacctccgcttcctaataaaatgaatgctgaggaactggtgctgagcctagggcccagccataaatatgttttgttttcttatctgtgattgcaggggggaagcagcccataaatggtctttgcctgaaatggtgagtaaggaaagcgaaaggctgagcataactaaatctgcctgtggaagaaatggcaaacaattctgcagtactttaaccttgaacacagctcaagcaaaccacactggcttctacagctgcaaatatctagctgtacctacttcaaagaagaaggaaacagaatctgcaatctatatatttattagtggtaagacttccattttctacattctgtttgcttttgctttgcaaatgagtcataaatctaccctgatccattggaaaggttgctttcctagtgagtatgaaagaaacgggttaggaaagagattccatcctagttgtagacactttcgtggatgtcaattttaaccagaattgtcaaggcccagttagtcactatgtgctccacaaagagagagactggtctgtataggtcacctctgtacccacagctcctagcacagtatgtggcccatagttggatgaataagtgaataaaaggattttagttctatttcttagttattgagaagcccaaaatagaatacatgatttttgtcatttaacacagctgcattctcttatatgttggaactgtaaaatactgttgtttctactaaattaataaacgcaatgttgctgttatctcgagtgttatataactggttccaatggacaatgttgtattatttcatgttcactgaggaactactataatgacatgagaactggcactgaccaagatacagtgcaaagggcaaagggcaaaaatgaatcatgtttgattcattttttatggtactcgtaaaaaaatcattttcattcattcataatttttatgatactgttcttccttccttagagaatgaacaaatgaagtaacattcaaaggggagaaatgcaaaatcttttaagaagtagaaactcacagtaaaattggaaccctgagaaagaataataaaaatggcctgtcactttcttcttccttgtttagttccaattttcaaatcttgaggggattaaagaaaaaaacgcacacacacaaacaaggctgtagagaacacaaagcaatattagtaggcacttcaggcacagaatcaggttaaaaaaaaaaaaaaaaaaa

SEQ ID NO: 38 - DNA, 2301 bp, Homo sapiens
gctgaaacctgccaaaattgaccacaagcagtattttagaaagcaagtgctccatgggaaagatttccaagtagattgcaaagcttccggctccccagtgccagagatatcttggagtttgcctgatggaaccatgatcaacaatgcaatgcaagccgatgacagtggccacaggactaggagatatacccttttcaacaatggaactttatacttcaacaaagttggggtagctggaggaaggagattatacttgctatgcccagaacaccctagggaaagatgaaatgaaggtccacttaacagttataacagctgctccccggataaggcagagtaacaaaaccaacaagagaatcaaagctggagacacagctgtccttgactgtgaggtcactggggatcccaaaccaaaaatattttggttgctgccttccaatgacatgatttccttctccattgataggtacacatttcatgccaatgggtctttgaccatcaacaaagtgaaactgctcgattctggaragtacgtatgtgtagcccgaaatcccagkggggatgacaccaaaatgtacaaactggatgtggtctctaaacctccattaatcaatggtctgtatacaaatagaactgttattaaagccacagctgtgagacattccaaaaaacactttgactgcagagctgaagggacaccatctcctgaagtcatgtggatcatgccagacaatattttcctcacagccccatactatggaagcagaatcacagtccataaaaatggaaccttggaaattaggaatgtgaggctttcagattcagccgmctttatctgtgtggcccgaaatgaaggtggagagagcgtgttggtagtacagttagaagtactggaaatgctgagaagaccgacatttagaaatccatttaatgaaaaaatagttgyccakytgkkaaagyccacagcattgaattgctctgttgatggtaacccaccacctgaaataatctggattttaccaaatggcacacgattttccaatggaccacaaagttatcagtatctgatagcaagcaatggttcttttatcatttctaaaacaactcgggaggatgcaggaaaatatcgctgtgcagctaggaataaagttggctatattgagaaattagtcatattagaaattggccagaagccagttattcttacctatgcaccagggacagtaaaaggcatcagtggagaatctctatcactgcattgtgtgtctgatggaatccctaagccaaatatcaaatggactatgccragtggtttgtagtagacaggcctcaaattaatgggaaatacatattgcatgacaatggcaccttagtmattaaagaagcaacagcttatgacagaggaaactatatctgtaaggctcaaaatagtgttggtcatacactgattactgttccagtaatgattgtagcctaccctccccgaattacaaatcgtccacccaggagtattgtcaccaggacaggggcagcctttcagctccactgtgtggccttgggagttcccaagccagaaatcacgtgggagatgcctgaccactcccttctctcaacggcaagtaaagagaggacacatggaagtgagcagcttcacttacaaggtaccctagtcattcagaatccccaaacctccgattctgggatatacaaatgcacagcaaagaacccacttggtagtgattatgcagcaacgtatattcaagtaatctgacatgaaataataaagtcaacaacatctgggcagaatttattttttggaagaagtttaatcaaaggcagccataggcatgtaaatgaatttgaatacatttacagtattaaatttacaatgaacatgcaaaataaaaggacttgtaaataaatgcattatgaactgatgatactgatttatttaatggatctcaaaacaaacttttaacttaaggcacttttattttgccaacaaataacaataaacaaacattgaaacggttcactataaaataacaaatggctaatgtacctgaatttttcagtaaaaaaatgaacttctaataccagttgcctagtgtccacctcctatcaatgttacaagcatggcactcagaacagagacaatggaaaatattaaatctgcaatctttatgatgtaaatttaccatcctgatgtataaatattttgtggtttataaatttttttgctaaaacctacagaaaaaaaaaaaaaaaaactcgagggggggcccggacccaattccccta

SEQ ID NO: 39 - DNA, 2751 bp, Homo sapiens
taaccctcactaaagggaacaaaagctggagctccaccgcggtggcggccgctctagaactagtggatcccccgggctgcaggaattcggcacgagtagagccgatctcccgcgccccgaggttgctcctctccgaggtctcccgcggcccaagttctccgcgccccgaggtctccgcgccccgaggtctccgcggcccgaggtctccgcccgcaccatgcggctgggcagtcctggactgctcttcctgctcttcagcagccttcgagctgatactcaggagaaggaagtcagagcgatggtaggcagcgacgtggagctcagctgcgcttgccctgaaggaagccgttttgatttaaatgatgtttacgtatattggcaaaccagtgagtcgaaaaccgtggtgacctaccacatcccacagaacagctccttggaaaacgtggacagccgctaccggaaccgagccctgatgtcaccggccggcatgctgcggggcgacttctccctgcgcttgttcaacgtcaccccccaggacgagcagaagtttcactgcctggtgttgagccaatccctgggattccaggaggttttgagcattgaggttacactgcatgtggcagcaaacttcagcgtgcccgtcgtcagcgccccccacagcccctcccaggatgagctcaccttcacgtgtacatccataaacggctaccccaggcccaacgtgtactggatcaataagacggacaacagcctgctggaccaggctctgcagaatgacaccgtcttcttgaacatgcggggcttgtatgacgtggtcagcgtgctgaggatcgcacggacccccagcgtgaacattggctgctgcatagagaacgtgcttctgcagcagaacctgactgtcggcagccagacaggaaatgacatcggagagagagacaagatcacagagaatccagtcagtaccggcgagaaaaacgcggccacgtggagcatcctggctgtcctgtgcctgcttgtggtcgtggcggtggccataggctgggtgtgcagggaccgatgcctccaacacagctatgcaggtgcctgggctgtgagtccggagacagagctcactggccacgtttgaccggagctcaccgcccagagcgtggacagggcttccatgagacgccaccgtgagaggccaggtggcagcttgagcatggactcccagactgcaggggagcacttggggcagcccccagaaggaccactgctggatcccagggagaacctgctggcgttggctgtgatcctggaatgaggccctttcaaaagcgtcatccacaccaaaggcaaatgtccccaagtgagtgggctccccgctgtcactgccagtcacccacaggaagggactggtgatgggctgtctctacccggagcgtgcgggattcagcaccaggctcttcccagtaccccagacccactgtgggtcttcccgtgggatgcgggatcctgagaccgaagggtgtttggtttaaaaagaagactgggcgtccgctcttccaggacggcctctgtgctgctggggtcacgcgaggctgtttgcaggggacacggtcacaggagctcttctgccctgaacgctcccaacctgcctcccgcccggaagccacaggacccactcatgtgtgtgcccacaagtgtagttagccgtccacaccgaggagcccccggaagtccccactgggcttcagtgtcctctgccacattccctgggaggaacaatgtccctcggctgttccggtgaaaagttgagccacctttggaagacgcacgggtggagtttgccagaagaaaggctgtgccagggccgtgtttggctacaggggctgccggggctcttggctctgcagcgagaaagacacagcccagcagggctggagacgcccatgtccagcaggcgcaggcctggcaacacggtccccagagtcctgagcagcagttaggtgcatggagagggtatcacctggtggccacagtcccccttctcacctcagcaatgatccccaaagtgagaggtggctcccccggcccccaccaccctcagcagccccaccccactcaaccctgagggtccccagggtcctgatgaagacctccgaccccagcgccaggctcctcggagcccaacagtcccaagggggcaggagacggggtggtccagtgctgaggggtacagccctgggccctgaccagccccggcacctgccatgctggttcccggaatgaatcagctgctgactgtctccagaagggctggaaaggatgctgccaggtgacccgaggtgcactcgccccagggagatggagtagacagcctggcctggccctcgggacacattgtctgccccgggrctatgggcaaatgcccctccttcttacttcccagaatcccctgacattcccagggtcagccaggacctgttacagccctggtcacttggaactgacagctgtgtgaggcctgcacttctcagacccagacttagaacaaaaggaggagtgaggactcaaggctacaatgaggttccagtacttgttacaagaaattggttttctgcaaaaaaagtccctacctgrgcctttaggtgaatgtgggatccactcccgcttttaacatgaaagcattagaagatgtgtggtgtttataaaaraaaaaaaaaaaaaactcgagggggggcccgtacgggaattcgccctatagtgagt

SEQ ID NO: 40 - DNA, 981 bp, Homo sapiens
  misc_feature (876): n equals a,t,g, or c
  misc_feature (903): n equals a,t,g, or c
  misc_feature (916): n equals a,t,g, or c
  misc_feature (931): n equals a,t,g, or c
  misc_feature (935): n equals a,t,g, or c
gccgacatccactttctggagcctctggagtccggccgccccacaaggctgagctgcagccttccaggatcctgtgaagcgggaccacctctcacattctcctggacggggaatgccctcagccccctggaccccgagaccacccgctcctcggagctcaccctcacccccaggcccgaggaccatggcaccaacctcacctgtmaggtgaaacgccaaggagctcaggtgaccacggagagaactgtccagctcaatgtctcctatgctccacagaacctcgccatcagcatcttcttcagaaatggcacaggcacagccctgcggatcctgagcaatggcatgtcggtgcccatccaggagggccagtccctgttcctcgcctgcacagttgacagcaacccccctgcctcactgagctggttccgggagggaaaagccctcaatccttcccagacctcaatgtctgggaccctggagctgctaacataggagctagagagggaggggaattcacctgccgggttcagcatccgctgggctyccagcacctgtccttyatyctttctgtgcararaagctcctcttcctgcatatgkgtaactgaraaacarcagggctcctggcccctcgtcctcaccctgatcaggggggctctcatgggggctggcttcctcctcacctatggcctcacctggatctactataccaggtgtggaggcccccagcagagcagggctgagaggcctggctgagccccttccgctcaagacagaactgaggtgtggacacttagccctgtgggacacatgcaggacatcactgtcagcttctttctggaagctcacattccactgactacccctcttttccttnctggcccatacccccttctacttattnccctctgctttgngagtcttggccccancatnttccaagcccttgtgaaagggaatggacctttcgggcttatacccc

SEQ ID NO: 41 - DNA, 367 bp, Homo sapiens
  misc_feature (258): n equals a,t,g, or c
tcgacccacgcgtccgcccacgcgtccgggacagaggcgagagcgaagaggaagcagctgcttctcttcacatcggtcatcctgggctccctggcgctgagcaggggtgcggtgcactcgtcggaacctaaagtctctgttgctgagaacagccccgccaagctgctctgctcctactccggcttctcctctccccgcgtggagtggaagtttgcccagggtgacatcaccagcctcgtctgctataacaacaagatnacagcttcctatgaggaccgagttaccttctcgcatagtggcatcatttccattctgtgacccggaaagactcgggcatgtacacgtgtatggtctccgacgaaagcgg

SEQ ID NO: 42 - DNA, 2224 bp, Homo sapiens
gcttctgttcaataaccgcttggtgcacttggacgagcatgccttccacggcctgcgcgcgctcagccatctctacctgggctgcaacgaactcgcctcgttctccttcgaccacctgcacggtctgagcgccacccacctgcttactctggacctctcctccaaccggctgggacacatctccgtacctgagctggccgcgctgccggccttcctcaagaacggcctctacttgcacaacaaccctttgccttgcgactgccgcctctaccacctgctacagcgctggcaccagcggggcctgagcgccgtgcgcgactttgcgcgcgagtacgtatgcttggccttcaaggtacccgcgtcccgcgtgcgcttcttccagcacagccgcgtctttgagaactgctcgtcggccccagctcttggcctagagcggccggaagagcacctgtacgcgctggtgggtcggtccctgaggctttactgcaacaccagcgtcccggccatgcgcattgcctgggtttcgccgcarcaggagcttctcagggcgccaggatcccgcgatggcagcatcgcggtgctggccgacggcagcttggccataggcaacgtacaggagcagcatgcgggactcttcgtgtgcctggccactgggccccgcctgcaccacaaccagacgcacgagtacaacgtgagcgtgcactttccgcgcccagagcccgaggctttcaacacaggcttcaccacactgctgggctgtgccgtgggccttgtgctcgtgctgctctacctgttcgccccaccctgccgctgctgccgccgtgcctgccgctgccgccgctggccccaaacacccagcccgctccaagagctgagcgcacagtcctcagtactcagcaccacaccgccagacgcacccagccgcaaggccagcgtccacaagcacgtagtctttctggagccaggccggaggggcctcaatggccgcgtgcagctggcagtagctgaggaattcgatctctacaaccctggaggcctgcagctgaaggctggctctgagtccgccagctycataggctccgagggtcccatgacaacctagactgcccagggctcccccacccaggcccccaccctcttgctgctcgccctgctccctgcttcggtccagagaactggcagatactggtgggaagcactgtgcctggccccccagcttcctgtatgggcctcgaaacacaatgggccttctcgctcactggtagagacaggggttgtggtccccaacctgccttctgctctgcccctgcacaggacccaaaggccccaggccctgcaaggtgtgctagttcctgctttcccgcggacttcctagtgcccaaatgccctgtgaggctgagagacccaggcccctgtggctttcaacacagcacagctgtggaagtggctgtgttcttctacagcctgtggaagaacccctgtagcagagcctcccgtccaccctcaggggctgagacagctctcgaggagtggtgctcaagagctgacgcagggccacctccccttcccaagggggtgggagggagtgggcccacagggaaaagaaggcggctctgaaggaagatctcgcccacaccccaggacagaaagaggaaacaagcccgccctctggtgaaatgggactccctccatccaccaacacccaacctcctgaaagcttcacaacttcacgcagagtccggtgggcaggcaccaggcaggaaaggctcctcaagaggttcctggtggtctggcctaagccccagccagaggccctgctctctctggcctggggcatccacccgttgttctgaaggcagagcccattctgtgggctcacaagacacagtgaaggggatcatggcctgcacccctgcttttcagcagtaaaaagcccgaaaagcctggcgagcatggccgagctgggagggccgagccggaactccacgtccctcgagagcaggagcctcttaagggctggcactggtctcagcctaatggctgaggcggtaccctggcttcatatgcatctcactgctcccactgcaggggggcagggaaggggggtctgggagcccttcatgtgtgggggccgagctgggggcccccatggccatcctggacctcgctgctccagagtttaataaaggtagcacatgcttattgctagaaaaaaaaaaaaaaa

SEQ ID NO: 43 - DNA, 612 bp, Homo sapiens
  misc_feature (562): n equals a,t,g, or c
  misc_feature (606): n equals a,t,g, or c
ggcagagctggacaagcccttttytcttctcacgtcccacctcgatgcactgccctgggagggggccccaagaccttagactggatgcctttgctgggccatgctattctmagacctcccgccttcacccccagggccccaratcgtgtcacatccatatgaacacttggaatgtgaacagggcaggatgtgaatctttggctgtgaaagtgtttgcctaccccatggcctccatcgagtggaggaaggatggcttggacatccagctgccaggggatgacccccacatctctgtgcagtttaggggtggaccccagaggtttgaggtgactggctggctgcagatccaggctgtgcgtcccagtgatgagggcacttaccgctgccttgcccgcaatgccctgggtcaagtggaggcccctgctagcttgacagtgctcacacctgaccagctgaactctacargcatcccccagctgcgatcactaaamctggttcctgargaggaggctgagagtkaagagaatgacgattactactwagtccagaactctgggcccanggggttgggtaaccggctataatgttcatcctggtcttgaaaanaccttg

SEQ ID NO: 44 - DNA, 2359 bp, Homo sapiens
  misc_feature (1): n equals a,t,g, or c
  misc_feature (2): n equals a,t,g, or c
nncggcacgagcaccatccagaaccgagcagatctcgtgataaatgaagtgatgtggtgggaccatggagtgtattactgcaccattgaggctccaggggacacatcaggagaccccgataaggaagtaaagctcatcgtcctacactggctgacagtgatcttcatcatcctgggagccctcctcctcctgctgctgattggagtgtgctggtgccagtgctgtcctcagtattgctgctgctatatccgctgtccctgctgtcctgcccactgctgctgtcctgaggaagccctggcccgccaccgctacatgaagcaggcccaggccctaggtcctcagatgatgggaaaacccctgtactggggggcggacaggagctcccaggtttcatcttatccaatgcacccgctgctgcagcgagatttgtccctgccgtccagcctcccgcagatgccaatgacccagaccaccaatcagcctcccatcgccaatggtgtcctggagtatttggagaaagaactgcggaacctcaacctggcccagcctctgccccctgacctcaaaggcagatttggccatccctgcagcatgctgtcctccctgggctctgaggtcgtggaacgcagaatcatccacctgcccccactgatcagagacctgtcatcctcaaggaggaccagtgactccctgcaccagcagtggctcaccccaattccctccaggccctgggatctgagggaggggagaagccaccaccattaccctgatttccaccaggagctccaggaccgggggccaaagtcttgggcattggaaagaagggagttggacccatcgtggagtggaaggcaccgtagctctaggctgaatgggtcacccatacactggtcagacagggacagcctaagcgatgtcccctcatccagtgaggcacgctggcggccgagccaccctcctttcaggagccgctgtcaggagaggccccgcaggcccagcccccgggagagcactcagaggcacgggagacgacgcaggcaccgcagctactctcctcccttgccctccggcctcagttcctggagctctgaagaggacaaggagaggcagccccagagctggcgggcccaccgccgcggctcgcactccccacactggcccgaggagaagccgcctagctaccgctcactggatatcactccaggcaagaatagcaggaaaaaagggagtgtggagaggcgctcggagaaagacagctctcatagtggaaggagtgtggtcatttagtcaccaagcacagcacaacttctgtggctacttctcggctcctgtgtgtcatcagcatcacctaggtttccagctgacttgggaactgcaagtctgagtctaacagtttttggcttagattctgagaatcaaatagaagaattttaaatacaagagtttgagattgggtatagtggctcacacctgtaatcacagcactttgggaggctaagaatcacttgagactaggagttcaagatcagcctgggaaacatagtgagaccccgtctctacaaaaaatataaaaattagttaggtgtggtggcatgcacttgtagtcccagctactcaagaggctgaggcagaaggatcccttgagcccaggagtgcaaggctgcaatgagccaggatcccatgatcacacatctgtattccagcctgggcaatagagcaagtccccattactaaaaaacccaaaaggccaaaaaacaaaaaagttagagttcgaggaattaccaactgtagttttagccttggttcatgctctcttgcatatttatataatctctgacttgtaatggaccctgactggaatgtgatccctcaggaacttagtagcctgagtctttcagtagactacactgcccagaaccctggccattctcaaaatgagaacttgggaatgtttaagaagaaatcaaacatgtttcaggaaaaggaaatctatggagtattatagggacattcccatgggaatgtatcttcctccatggcatgtcttgagggtcctttcttgttaggagtttatcctgccagcccataaatggactatttattgtaagtgtagaaaatcacagagaagcagttttgcaccagccttattcctgtgccttgttttcctcttgctctttttttacctgtatatctaatttatattttcatatatattgtgtattgattgaagtcactttaaatccttcttgggaatgacacagtatataaataaggaagaaagaaaacatgccaagctgagcatgctgctccaaataaatatctgctttcctaaaaaaaaaaaaaaaaaaaaaaaaaaaaa

SEQ ID NO: 45 - DNA, 654 bp, Homo sapiens
  misc_feature (466): n equals a,t,g, or c
  misc_feature (524): n equals a,t,g, or c
  misc_feature (554): n equals a,t,g, or c
  misc_feature (619): n equals a,t,g, or c
  misc_feature (637): n equals a,t,g, or c
  misc_feature (649): n equals a,t,g, or c
gcatggttcttgctcaagtaccaactctatggacccaggacaggtttgtcccatgacctgctgtgaacagtgtgttgtctgatagaagattcggttggcaaaccatctctctattgccttacagagcaagcaaagaagatggatcgattgaagagccatctgactgtgtgctttctaccttctgtgccctttttaatcctagtatccactctagccaccgctaagagtgtgactaacagcactttaaatggcactaacgtggtcttgggctctgtgcccgtaatcattgccagaactgaccatatcatagtcaaggaagggaacagtgccttgattaactgtagtgtttatggcatccctgacccacagttcaagtggtataattccattggcaagctgctgaaagaagaagaggatgagaaggagagaggaggaggaaaatggcaaatgcacgacagcggcctcntgaacatcaccaaggtatccttctcagaccgaggtaaatacacgtgtgtggcttctancatctacggcaccgtgaacaacacggtgancttgcgcgtcatcttcacttctggggacatggggtgtctactacattggtcgtgtgcctgggggncttcacatccgtcatggncctcaatatcancccgc

SEQ ID NO: 46 - DNA, 2092 bp, Homo sapiens
aacgcaccgcacctaccggtccggaattcccgggtcgacccacgcgtccggcggaaggacagcttgctggccgtgcgctggttctttgcacactccttcgactcccaggaggccttgatggtgaagatgaccaagctccgggtggtgcagtactatgggaatttcagccgcagcgccaaacggcggaggctgcgcctgctggaggagcagcggggggcgctctacaggctctccgtcttgacactgcagccctccgatcaagggcattacgtctgcagagtccaggaaatcagcaggcacaggaacaagtggacggcctggtccaatggctcctcagccacggaaatgagagtcatttccctcaaagcttctgaagagtcatcctttgagaaaacaaaagagacttgggcattttttgaagatctctatgtgtatgctgtcctcgtgtgctgcatggggatcctcagcattctgctcttcatgctggtcatcgtctggcagtctgtgtttaacaagcggaaatccagagtgagacattatttggtgaaatgccctcagaacagctcaggggagagctgtcactagcgtgaccagcttggccccactacagcccaagaagggcaagaggcagaaggagaagcctgacattcctcccgcagtccctgccaaagctccgatagcccccacgttccataaaccgaagctgctgaaaccacagagaaaagtcacgctgccaaagattgctgaggaaaacttaacctatgccgagctggagctgatcaaaccccaccgggctgccaaaggcgcccccaccagcactgtctacgcccagatcctcttcgaggagaacaagctgtagtacagcgtccacctccaggttctatttaatacctgccacccagtgatttatgaagccttggagacaaagcccttatgtctgtattttcactcatgccttctgagtggtggggagccccttttcagcagcattctgggtgcctttgaagaggtacaagcctgctctccccaaaagaatcagggccacagctcttgacagatctcccgggacaagatgcgcctgggtttgagccctgagcgtaaggattctgatcctgagagcagccaaggagattttctgctgagccaaaccccttcacatttttctcctctttccccaggttttctttaaaatcgtttttaaatcttaattttactctctactcttcctgtatccacgatacaagctcacagtatatagctagaggaaatgccattatggacccaactgtaagatggcacatatgttggttttccaaggatcagatggcattgcagggccacagccaactgctgattgccagcaccacctgagatggcatctcttgttttaaatagatgcactaaccctgaagattaaggccagaggggcagactgactagagaagtataaggtctgtctctgaatgccatggtgcccacctatgagaccctgaggccgcagacaaagaagaacaccattctagagggcttccagccctttcacaaggtggacctgtactgatagagaaacacactctctaagaagtgcttactcacccttttccaaaggagcacaggtgttggccatcagaagacacactggagcgcatgggcctcttcactgtgtgccaagctcagtcacctctgattcagcccctgagggtgtctgctgccaggtgccctcagggtaggagagtgggaagtacacgccaagctggaaagtgtgttctgaagaccctcctcttgccaagtgccttgcccattgcaaccttgtgtgtgaattctaatgggtttgaatgggggtcagggtgcatggggaagttgctctgtggacctttgggacacaggaatcttggacttactggcaggggatccattctgaaagcaccatcctgtcaactgtgttattgaggacatttcttgatgtgagtatagtctgggtggctatttactgcccactatagaaattgtttgactatgtagtggaccatgtatatatgataaattatctattttaaacacaaaaaaaaaaaaaaaaaaaaagggcggccgc

SEQ ID NO: 47 - DNA, 1654 bp, Homo sapiens
gctcgaaattaaccctactaaagggaacaaaagctggagctccaccgcggtggcggccgctctagaactagtggatcccccgggctgcaggaattcggcacgagctcagccatgggagggagatggttccttctgcatgcttctctatctcctgatggctggtgctgagatgacaaatgcatctctctaggaactctgagcctcaccaccctggagactatgttgtttcttttcattagagctgtttctacatcctgtgctgagagccagctcttccacgcccatagaggggagtcccatgaccctgacctgtgagacccagctctctccacagaggccagatgtccagctgcaattctccctcttcagagatagccagaccctcggattgggctggagcaggtcccccagactccagatccctgccatgtggactgaagactcagggtcttactggtgtgaggtggagacagtgactcacagcatcaaaaaaaggagcctgagatctcagatacgtgtacagagtgagtgtctaaggggctgctcttccagagtcagagctggggagaggaaggccagtgatatctcctgcacccctaggatggtggacataacagagaggagtgtccagctattctggtaatcttctctctttaagctcaacgttggtctaacagccctagaacattttcttycacttgagtcaggtaatagtaattattgatcagttactgattgcccaaccctatggggttacagagatgtacaagatcggttctctcatgaatcaagagacaactagaagcacaactgaacacatgcagttttaagaggcccctgtggtgcttccatttggtaacctgaactcacaacaaaatagtccgaaaaggggaagatgaatatgaactgtaatagtcagagaaagacatggagacatggatgtaaatctggagaagtcttgaagaataggagaagggtttggattctattttgatcttcaaaacagaggatctccagtgttctcttttattttgtggtttattgatgcatcaaagattccttagagataaatgcatataaaatgtgaccagaaaacattggatttatggagattatggacttggtgcccacatttctcaaggatgggaatgttgtgggagtgagagggatgttgcttcctttataatcgtatacacaattaatttcttatttcctactttgggcttctgctgctgcacctgctgctattggcctattcatggtagctccagccttccccttgaccttgatgtccctgccatcaggaccttcacatgccatcttgtgttcccccaggagtccctgtgtctaatgtgaatctagagatccggcccaccggasggcagctgattgaaggagaaaatatggtccttatttgctcagtagcccagggttcagggactgtcacattctcctggcacaaagaaggaagagtaagaagcctgggtagaaagacccagcgttccctgttggcagagctgcatgttctcaccgtgaaggagagtgatgcagggagatactactgtgcagctgataacgttcacagccccatcctcagcacgtggattcgagtcaccgtgagaagtaagttccgattcctttcacacagcctcga

SEQ ID NO: 48 - DNA, 351 bp, Homo sapiens
  misc_feature (15): n equals a,t,g, or c
  misc_feature (323): n equals a,t,g, or c
cggaaactgattgantgcaaagctgaaggcatccccaccccgagggtgttatgggcttttcccgagggtgtggttctgccagctccatactatggaaaccggrtcactgtccatggcaacggttccctggacatcaggagtttgaggaagagcgactccgtccagctggtatgcatggcacgcaacgagggaggggaggccaggttgatcctgcagctcactgtcctggagcccatggagaaacccatcttccacgacccgatcagcgagaagatcacggccatggcgggccacamcatcagcctcaactgctctgccgcggngaccccgacaaccaggctggtgtggggt

SEQ ID NO: 49 - DNA, 2690 bp, Homo sapiens
  misc_feature (602): n equals a,t,g, or c
  misc_feature (2654): n equals a,t,g, or c
  misc_feature (2673): n equals a,t,g, or c
  misc_feature (2686): n equals a,t,g, or c
aattggcacgaggtgctttctctgggcttgacaaactgaggcgactgatactccaaggaaatcggatccgttctattactaaaaaagccttcactggtttggatgcattggagcatctagacctgagtgacaacgcaatcatgtctttacaaggcaatgcattttcacaaatgaagaaactgcaacaattgcatttaaatacatcaagccttttgtgcgattgccagctaaaatggctcccacagtgggtggcggaaaacaactttcagagctttgtaaatgccagttgtgcccatcctcagctgctaaaaggaagaagcatttttgctgttagcccagatggctttgtgtgtgatgattttcccaaaccccagatcacggttcagccagaaacacagtcggcaataaaaggttccaatttgagtttcatctgctcagctgccagcagcagtgattccccaatgactttggsttggaaaaaagacaatgaactactgcatgatgctgaaatggaaaattatgcacacctccgggcccaaggtggcgaggtgatggagtataccaccatccttcggctgcgcgaggtggaatttgccagtganggggaaatatcagtgtgtcatctccaatcactttggttcatcctactctgtcaaagccaagcttacagtaaatatgcttccctcattcaccaaggacccccatggatctcaccatccgagctggggccatggcacgcttggagtgtgctgctgtggggcacccagccccccagatagcctggcagaaggatgggggcacagacttcccagctgcacgggagagacgcatgcatgtgatgcccgaggatgacgtgttctttatcgtggatgtgaagatagaggacattggggtatacagctgcacagctcagaacagtgcaggaagtatttcagcaaatgcaactctgactgtcctagaaacaccatcatttttgcggccactgttggaccgaactgtaaccaagggagaaacagccgtcctacagtgcattgctggaggaagccctccccctaaactgaactggaccaaagatgatagcccattggtggtaaccgagaggcacttttttgcagcaggcaatcagcttctgattattgtggactcagatgtcagtgatgctgggaaatacacatgtgagatgtctaacacccttggcactgagagaggaaacgtgcgcctcagtgtgatccccactccaacctgcgactcccctcagatgacagccccatcgttagacgatgacggatgggccactgtgggtgtcgtgatcatagccgtggtttgctgtgtggtgggcacgtcactcgtgtgggtggtcatcatataccacacaaggcggaggaatgaagattgcagcattaccaacacagatgagaccaacttgccagcagatattcctagttatttgtcatctcagggaacgttagctgacaggcaggatgggtacgtgtcttcagaaagtggaagccaccaccagtttgtcacatcttcaggtgctggatttttcttaccacaacatgacagtagtgggacctgccatattgacaatagcagtgaagctgatgtggaagctgccacagatctgttcctttgtccgtttttgggatccacaggccctatgtatttgaagggaaatgtgtatggctcagatccttttgaaacatatcatacaggttgcagtcctgacccaagaacagttttaatggaccactatgagcccagttacataaagaaaaaggagtgctacccatgttctcatccttcagaagaatcctgcgaacggagcttcagtaatatatcgtggccttcacatgtgaggaagctacttaacactagttactctcacaatgaaggacctggaatgaaaaatctgtgtctaaacaagtcctctttagattttagtgcaaatccagagccagcgtcggttgcctcgagtaattctttcatgggtacctttggaaaagctctcaggagacctcacctagatgcctattcaagctttggacagccatcagattgtcagccaagagccttttatttgaaagctcattcttccccagacttggactctgggtcagaggaagatgggaaagaaaggacagattttcaggaagaaaatcacatttgtacctttaaacagactttagaaaactacaggactccaaattttcagtcttatgacttggacacatagactgaatgagaccaaaggaaaagcttaacatactacctcaagtgaacttttatttaaaagagagagaatcttatgttttttaaatggagttatgaattttaaaaggataaaaatgctttatttatacagatgaaccaaaattacaaaaagttatgaaaatttttatactgggaatgatgctcatataagaatacctttttaaactattttttaactttgttttatgcaaaaaagtatcttacgtaaattaatgatataaatcatgattattttatgtatttttataatgccagatttctttttatggaaaatgagttactaaagcattttaaataatacctgccttgtaccattttttaaatagaagttacttcattatattttgcacattatatttaataaaatgtgtcaatttggnggcccaggcccccattttntaccaataaccantttt

SEQ ID NO: 50 - DNA, 1103 bp, Homo sapiens
  misc_feature (306): n equals a,t,g, or c
aaatatgcaggagctatggaatctgaaccctgtgtctgcactgaggctgattttgattgcgactatggttatgagcgacacagcaatggccagtgcctgccggcattttggttcaatccatcctctctgtcaaaggattgcagcttgggacagagttacctcaatagtactgggtacaggaaggtggtttccaataattgcactgatggcgtaagggaacagtacactgccaaaccgcagaagtgcccagggaaagccccgcgggggctgcgsgatagtcacggctgatggaaagctgacagcggnaacaaggacacaacgtcactctcatggtgcaattagaagagggtgatgttcagcggacactcatccaagtggactttggcgatggtatcgcggtgtcttacgtcaatctcagctccatggaagatgggatcaaacacgtctatcagaacgtgggcattttccgtgtgaccgtgcaggtggacaacagtctgggttctgacagcgccgtcctgtacttacatgtaacttgtcccttggagcacgtgcacctgtctcttccctttgtcaccacaaagaacaaagaggtcaatgcgacggcagtgctgtggcccagccaagtgggcaccctcacttatgtgtggtggtacggaaacaacacggagcctttgatcaccttggagggaagcatatccttcagatttacttcagaaggaatgaataccatcacagtgcaggtctcagctgggaatgccatcctacaagacacaaagaccatcgcagtatatgaggaattccggtctcttcgcttgtccttttctccaaacctggatgactacaacccggacatccctgagtggaggagggacatcggtcgagtcatcaaaaaatccctggtggaagccacaggggttccaggccagcacatcctggtggcggtgctccctggcttacccaccactgctgaactctttgtcctaccctatcaggatccagctggagaaaacaaaaggtcaactgatgacctggarcacatatcagaattgctgatccacacgctyaaccaaaactcagtacacttcgagctgaagccaggagtc

SEQ ID NO: 51 - DNA, 445 bp, Homo sapiens
  misc_feature (215): n equals a,t,g, or c
  misc_feature (424): n equals a,t,g, or c
  misc_feature (445): n equals a,t,g, or c
gatgcacattattgaagagacacaagtgttcagggagtcccagtctgtggaaaatctagtcatctctctattgcagcacagcctctatgtgggggctcctagcggagtcatccagctaccactctccagctgctcccgctaccgatcctgctatgactgcatcttggcccgagacccctactgtggctgggaccctggcacccatgcctgcgcanagccaccaccatagccaacaggtcccagggaagcaggacagcactgatacaggacatagagagaggaaatcgaggctgtgagagcagcagggatacagggccamcamcaccactgaagacccgctctgtgctccggggtgatgatgtcctcctgccctgtkamcagccatccaacctggcccgggccttgtggctactcaatgggagcntgggcctgagcgatgggcaan

SEQ ID NO: 52 - DNA, 1419 bp, Homo sapiens
gacctcatccaaaccctctgatttccttaacttggctaagaaaaagaggaagttctccgagtgactcaccactgtggttctactatgccttctgaccccgtcttggacttcaactgggagaatgtggagccatttgaacaggctcctcttctggagcatattttcttctgtcacttgtagaaaagctgtattggattgtgaggcaatgaaaacaaatgaattcccttctccatgtttggactcaaagactaaggtggttatgaagggtcaaaatgtatctatgttttgttcccataagaacaaatcactgcagatcacctattcattgtttcgacgtaagacacacctgggaacccaggatggaaaaggtgaacctgcgatttttaacctaagcatcacagaagcccatgaatcaggcccctacaaatgcaaagcccaagttaccagctgttcaaaatacagtcgtgacttcagcttcacgattgtcgacccggtgacttccccagtgctgaacattatggtcattcaaacagaaacagaccgacatataacattacattgcctctcagtcaatggctcgctgcccatcaattacactttctttgaaaaccatgttgccatatcaccagctatttccaagtatgacagggagcctgctgaatttaacttaaccaagaagaatcctggagaagaggaagagtataggtgtgaagctaaaaacagattgcctaactatgcaacatacagtcaccctgtcaccatgccctcaacaggcggagacagctgtcctttctgtctgaagctactacttccagggttattactgttgctggtggtgataatcctaattctggctttttgggtactgcccaaatacaaaacaagaaaagctatgagaaataatgtgcccagggaccgtggagacacagccatggaagttggaatctatgcaaatatccttgaaaaacaagcaaaggaggaatctgtgccagaagtgggatccaggccgtgtgtttccacagcccaagatgaggccaaacactcccaggagctacagtatgccacccccgtgttccaggaggtggcaccaagagagcaagaagcctgtgattcttataaatctggatatgtctattctgaactcaacttctgaaatttacagaaacaaactacatctcaggggggctgaggcacgagaatcgcttaagtctgggaggcagaggttgcagtgagccaagatcgcaccacggcactccagcctgggcaacagagtgagaccctgtgttaagaaaagaaaagagaaaagaagaaaagaaaagaaaaaggaaaaggaaggaaggaaggaaagagagaaaagaagagaaacaggtgaaatgaattggaataatatattttatttaacccaaaaaaaaaaaaaaa

SEQ ID NO: 53 - DNA, 458 bp, Homo sapiens
aaaggttttggtctttgttctaaatagttatgatttgtttttcttttctgttttgtctccagtaaaaaaaagcttatctttttattttctccctagcttcaaaatagatttttgtctggacataaaatctgttctttaatcttatatctctaaacaaaaccatatggcttactgtcacttctttggcaaggcttgagtttctttcaggatatgttgtaaagttcccataggctgtaagttgacctcacctatagagttagaattgtaaargagctacattcctattccaaawtttctgcaaagtgccagattgcagcttattactcttctagagccccccatawttacgtyctttttccttcccaggaatcctcctcactcactctctattgcagccaagacatgtttgggctaggaccaggggaaggccataggaaataatgtaaccccttattcag

SEQ ID NO: 54 - DNA, 699 bp, Homo sapiens
  misc_feature (682): n equals a,t,g, or c
  misc_feature (688): n equals a,t,g, or c
gaggttctgcaggtacggcccggaatcacgggtcgaccacgcgtccgcccacgcgtccgcccacgcgtccgcccacgcgtccgctgctaacaagcctttggtaagtcacttcagatacttttcctcctttttacaaagagagggctggcttagttatttgccaaagccccttccaggcctgaattccacaagtacgatttactgtagtgtcttatcactctttcatgtcacaatagcgtggagcattagagaaaagcctagacttttagttgatagccagttgaaatatcattgatagaattttagttttaggaaaaattggtttgatttctagctttattactattaggtatgtgagcttgggcaaatcgcttaatctttgagtctagttttctctcaaaatgagaacattaggctaaatgatttccgagtttccagctagtcctagagttctatatttctacatagttgaattattttatcatgctgttgytggggaatatgactaacccttttgaagctactaattttatgtcgagctttaaagtccataattgttatcttcagaaaatattatttgacctacagtatgtccaaatcaatttaataaaatcgctttataacagggaaaaaaaaaaaaaaaaacccgggggggggcccgttacccattgggccctagtgngtcgtnttacaattcaa

SEQ ID NO: 55 - DNA, 1737 bp, Homo sapiens
  misc_feature (533): n equals a,t,g, or c
gctgaggctcagccaagcccaggggaacctgtcggttctggagacccggcaggtacagctggagtgtgtggttctcaaccgcaccagcataacctcccagctcatggtggaatggtttgtatggaagcccaaccaccctgagcgggagactgtggcccgcttgagccgtgacgccaccttccactatggagagcaggcagccaagaacaatctgaaggggcggctgcatttggagagtccttcccccggcgtgtaccgtctcttcatccagaacgtggctgtgcaggacagcgggacctacagctgccatgtggaggagtggctgcccagccccagtggcatgtggtataagcgggcagaggacaccgctgggcagacagctctgacagtcatgcgaccagatgcttccctgcaggtggacacagtggtccccaatgccacggtctctgagaaggcagctttccagctggactgtagcatcgtgtcccgctccagccaggactcccgcttcgctgtggcctggtattccctgnggactaaagctggggggaaaggagcagccctggcctggaagacaggaagaggaaagggaggaggaggaggaggaggacgacgacgacgacgacgacccaacagagcggacggccctgctgagcgtgggcccagatgctgtctttggcccagagggcagtccttgggagggcaggcttcgcttccagaggctctccccggtgctctaccggctcacagtgctgcaggcaagcccccaagatacaggcaattactcctgccatgtggaggagtggctgcccagccctcagaaggaatggtaccggctgacggaggaggagtcagcccccatcggcatccgtgttctagatacaagtcccaccctccagtccatcatctgctccaacgacgcactcttctacttcgtcttcttctaccctttccccatctttggcattcttatcatcaccatccttctggtgcgtttcaagagccggaactccagcaagaactctgatgggaagaatggggtgcctctgctgtggatcaaagagccacacctcaactactcccctacttgcctggagccccctgttctcagtatccatccaggggccatagactaagcgggtgatgccccagcggatgttggccacggaggagctgaggctctccctttctctgtgattggacagttgacagcacccaaactctggggtgcatgtgtgtggaaagttgtcagacttgaaaagtgttccaagttcccagtcagtcacagagacagactgcctctcggtggcagtcttggttggttagctatttgcgcgcaaatgttgtgatcctgccattatagatttcttgtttctgtttttagtaatgtagtgagtagctccaggtgccacatctactcacagatttatctagtattctcagatagatgttacagggcttcttattctttgtaatgtactctttttaaatccctttagtttaccctttttggattccttaatgtggacgaatttctcttacgtacaactgacagcaaaaggaagggcgaactttctagtgacaaggaatctcttccaagactttgtttttgcacatttgaaaatgccacccatggatcaaaatatacccaaacgttttttactttcttaaaaaaaaaaaaaaaaaaaaaaaaaaaaaaaaaaaaaaaaaaaaaaaaaaaaaaaaaaaaaaaaaagg

SEQ ID NO: 56 - DNA, 734 bp, Homo sapiens
  misc_feature (668): n equals a,t,g, or c
  misc_feature (677): n equals a,t,g, or c
  misc_feature (680): n equals a,t,g, or c
gctgtgaattaaaatatggaggctttgttgtgagaagaactactgaattaactgttacagcccctctgactgataagccacccaagcttttgtatcctatggaaagtaaactgacaattcaggagacccagctgggtgactctgctaatctaacctgcagagctttctttgggtacagcggagatgtcagtcctttaatttactggatgaaaggagaaaaatttattgaagatctggatgaaaatcgagtttgggaaagtgacattagaattcttaaggagcatcttggggaacaggaagtttccatctcattaattgtggactctgtggaagaaggtgacttgggaaattactcctgttatgttgaaaatggaaatggacgtcgacacgccagcgttctccttcataaacgagagctaatgtacacagtggaacttgctggaggccttggtgctatactcttgctgcttgtatgtttggtgaccatctacaagtgttacaagatagaaatcatgctcttctacaggaatcattttggagctgaagasctcgatggagacaataaagattatgatgcatacttatcatacaccaaaagtggatcctgaccagtggaatcaagagactgggggaagaagaaccgttttggccttgaaatcctacctganatgcttganagnccttatggatataagtggttatcccagattgagatttaatcccactggaacata

SEQ ID NO: 57 - DNA, 4656 bp, Homo sapiens
  misc_feature (65): n equals a,t,g, or c
tatctccgaacaaaagcctggagctccaccgcggtggcggccgctctagaactagtggatccccngggctgcaggaattcggcacgagtattatttttgcgggaggtgataagtggtcagtggatcctcgagtttcaatttcaacattgaataaaagggactacagcctccagatacagaatgtagatgtgacagatgatggcccatacacgtgttctgttcagactcaacatacacccagaacaatgcaggtgcatctaactgtgcaagttcctcctaagatatatgacatctgcaaatgatatgaccgtcaatgaaggaaccaacgtcactcttacttgtttggccactgggaaaccagagccttccatttcttggcgacacatctccccatcagcaaaaccatttgaaaatggacaatatttggacatttatggaattacaagggaccaggctggggaatatgaatgcagtgcggaaaagatgtgtcattcccagatgtgaggaaagtaaaagttgttgtcaactttgctcctactattcaggaaattaaatctggcaccgtgacccccggacgcartggcctgataagatgtgaaggtgcaggtgtgccgcctccarcctttgaatggtacaaaggagagaaraagctcttcaatggccaacaaggaattattattcaaaattttagcacaagatccattctcactgttaccaacgtgacacaggagcacttcggcaattatacttgtgtggctgccaacaagctaggcacaaccaatgcgagcctgcctcttaaccctccaagtacagcccagtatggaattaccgggagcgctgatgttcttttctcctgctggtaccttgtgttgacactgtcctctttcaccagcatattctacctgaagaatgccattctacaataaattcaaagacccataaaaggcttttaaggattctctgaaagtgctgatggctggatccaatctggtacagtttgttaaaagcagcktkggwtatatcagcagtgcttacatggggatgatcgccttctgtagaattgctcattatgtaaatacttwaattctactcttttttgattagctacattaccttgtgaagcagtacacattgtcctttttttaagacgtgaaagctctgaaattacttttagaggatattaattgtgatttcatgtttgtaatctacaacttttcaaaagcattcagtcatggtctgctaggttgcaggctgtagtttacaaaaacgaatattgcagtgaatatgtgattctttaaggctgcaatacaagcattcagttccctgtttcaataagagtcaatccacatttacaaagatgcatttttttcttttttgataaaaaagcaaataatattgccttcagattatttcttcaaaatataacacatatctagatttttctgctcgcatgatattcaggtttcaggaatgagccttgtaatataactggctgtgcagctctgcttctctttcctgtaagttcagcatgggtgtgccttcatacaataatatttttctctttgtctccaactaatataaaatgttttgctaaatcttacaatttgaaagtaaaaataaaccagagtgatcaagttaaaccatacactatctctaagtaacgaaggagctattggactgtaaaaatctcttcctgcactgacaatggggtttgagaattttgccccacactaactcagttcttgtgatgagagacaatttaataacagtatagtaaatataccatatgatttctttagttgtagctaaatgttagatccaccgtgggaaatcattccctttaaaatgacagcacagtccactcaaaggattgcctagcaatacagcatcttttcctttcactagtccaagccaaaaattttaagatgatttgtcagaaagggcacaaagtcctatcacctaatattacaagagttggtaagcgctcatcattaattttattttgtggcagctaagttagtatgacagaggcagtgctcctgtggacaggagcattttgcatattttccatctgaaagtatcactcagttgatagtctggaatgcatgttatatattttaaaacttccaaaatatattataacaaacattctatatcggtatgtagcagaccaatctctaaaaagctaattcttcaataaaatctttctatatagccatttcagtgcaaacaagtaaaatcaaaaaagaccatcctttatttttccttacatgatatatgtaagatgcgatcaaataaagacaaaacaccagtgatgagaatatcttaagataagtaattatcaaattattgtgaatgttaaattatttctactataaagaagcaaaactacatttttgaaggaaaatgctgttactctaacattaatttacaggaatagtttgatggtttcactctttactaaagaaaggccatcaccttgaaagccattttacaggtttgatgaagttaccaatttcagtacacctaaatttctacaaatagtccccttttacaagttgtaacaacaaagaccctataataaaattagatacaagaaattttgcagtggttatacatatttgagatatctagtatgttgccctagcagggatggcttaaaaactgtgattttttttcttcaagtaaaacttagtcccaaagtacatcataaatcaattttaattagaaaaatgaatyttaaatgaggggacataagtatactctttccacaaaatggcaataataaggcataaagctagtaaatctactaactgtaataaatgtatgacattattttgattgatacattaaaaaagagtttttagaacaaatatggcatttagctttattatttatttgcttttaagaaatattctttgtggaattgttgaataaactataaaatattattttgtattgcagctttaaagtggcacactccataataatctacttactagaaatagtggtgctaccacaaaaaatgttaaccatcagtaccattgtttgggagaaagaaacagatcaagaatgcatattattcagtgaccgctttcctagagttaaaatacctcctctttgtaaggtttgtaggtaaattgaggtataaactatggatgaaccaaataattagttcaaagtgttgtcatgattccaaatttgtggagtctggtgtttttaccatagaatgtgacagaagtacagtcatagctcagtagctatatgtatttgcctttatgttagaagagactttcttgagtgacatttttaaatagaggaggtattcactatgtttttctgtatcacagcagcattcctagtccttaggccctcggacagagtgaaatcatgagtatttatgagttcaatattgtcaaataaggctacagtatttgcttttttgtgtgaatgtattgcatataatgttcaagtagatgattttacatttatggacatataaaatgtctgattaccccattttatcagtcctgactgtacaagattgttgcaatttcagaatagcagttttataaattgatttatcttttaatctataacaatttgtgttagctgttcatttcaggattatattttctacaagttccacttgtgggactccttttgttgcccctatttttttttaaagaaggaagaaagaaaaataagtagcagtttaaaaatgagaatggagagaaaagaaaaagaatgaaaaggaaaggcagtaaagagggaaaaaaaaggaaggatggaaggaatgaaggaaggaagggaggaaggggagaaggtaggaagaaagaaaggatgagagggaaggaagaatcagagtattagggtagttaacttacacatttgcattcttagtttaactgcaagtggtgtaactatgtttttcaatgatcgcatttgaaacataagtcctattataccattaagttcctattatgcagcaattatataataaaaagtactgcccaagttatagtaatgtgggtgtttttgagacactaaaagatttgagagggagaatttcaaacttaaagccacttttggggggtttataacttaactgaaaaattaatgcttcatcataacatttaagctatatctagaaagtagactggagaactgagaaaattacccaggtaattcagggaaaaaaaaaaatatatatatatataaatacccctacatttgaagtcagaaaactctgaaaaactgaattatcaaagtcaatcatctataatgatcaaatttactgaacaattgttaatttatccattgtgcttagctttgtgacacagccaaaagttacctatttaatcttttcaataaaaattgttttttgaaatccagaaatgatttaaaaagaggtcaggtttttaactatttattgaagtatgtggatgtacagtatttcaatagatatgaatatgaataaatggtatgccttaagattctttgaatatgtatttactttaaagactggaaaaagctcttcctgtcttttagtaaaacatccatatttcataacctgatgtaaaatatgttgtactgtttmcaataggtgaatataaactcagtttatcaattaaaaaaaaaaaaaaaaaactcgag

SEQ ID NO: 58 - DNA, 1494 bp, Homo sapiens
  misc_feature (964): n equals a,t,g, or c
tcgagttttttttttttttttttgccagcttgagagaaccttttccttcttgcatgtgtatcaaaggatacaggacaatcccagccagaagccaatagtcatgtcttctgtgccagatctcattgagtttccccgaggaaatagctgcccgttcctcattctgccacagtgtgtgaagctctgcaaagaaggcagcagacagaagaggtaacagggttttgcagactgcactcagtccaacagacaggtagagatggagaaactgaataatgaaagggaactaagggctcctgaagaggaatgggtaaaggttaggtttggaacaaactcagttctaaccaggttcgttagaattaagaataaaggtgggattagggccagcttkggagttaagagggatacttaagaaagatttagagcaaggatcggagtcagcatgcaacatacttcattggaagttacttggaattaaaggtagcaggaagcctcaggcaaaacgagaaaccccatgaggatgagcagatccccttgaggagcagaaagcmgcgagartctcccmaacctgtgaagccaccatcggcgatatkgaacatgaamcggggcttctctgtcttttcctctcgtcgcccattggaccgtggctcatctcgaggccytggtcgaagytcccggtcaccttttacatcttctgctaggacagacaggtcaaagctcacacctcaggacaccctcctcccaggtcccaagactactatctgtactgtactgtactggcctttcaaacagctacccgcccaggacccaagcattcggttccccagactccacctcccctgcatgccctctgggacccaggtgtccggtcccttccacccattacctctcttgcccaaatcccctgtttccccctccggcctctccctgtgttcctgtccatccaaccttctcctcccccctttctccnggcgtcgactctgtggctgacttytytctgtccccacggtacccaggttcaggctccatytctccaggcacccctggcmcctcatcctytagaggaatcttccttggctccagccgctccccaagtratggggstgggctgggggcatcagcctctgtctccatcttctccccaattctgctgttcttctctggcttttcctcctggttttcagcttcctccttctcaagaggtgtccttatgccttctcctttctcacttggagctggagtagcaggttwagaggtgcagggactgttggtagcagaagcctcaggagtggtgggagacgttttggtaggagaggaggctctggaggagcgcttagaatcggcgctggggtcaggcatcagttccggcattgaccaacgcccattgatgtgctcaaactcctgcaccttctttttgacgagagacatgactccaatgcgggtcaacwcctgtggcgactcagtccctcccgagggaccccatcggcaaaggtttcagga

SEQ ID NO: 59 - DNA, 559 bp, Homo sapiens
ctggagccgccggcctccgaccccgagctgcagcccgccgagcgcccgctgccatcgccggggtccggggagggcgccccggtcttcctcacggggcctcgatcccagtgggtgctgcggggggcggaggtggtgctgacgtgccgggcggggggcctccccgagcccacactgtactgggagaaggacgggatggccctggacgaagtgtgggacagcagccacttcgcgctccagccgggccgcgccgaggacggccccggcgcgagcctggcaytgcgcatcctggcggctcggctgccggattccggcgtctacgtgtgccacgcccgcaacgcgccacggccacgcgcaggcggggcgctgctccaggtgcaccagccccccgagagcccgcccgcggaccccgacgaaggcccccgcgccggtggtggagcgctcaagtgcgcgcctaagaccttctgggtgaacgagggcaagcacagccaagttccgctgctacgtgatgggcaagcccgagcccgagatcgaatggcactgggagggccgcccgctgctt

SEQ ID NO: 60 - DNA, 394 bp, Homo sapiens
  misc_feature (36): n equals a,t,g, or c
ctgccgaccagggctcctacaggtgtatcgtcagcnagtggatcgccgagcagggcaactggcaggaaatccaagaaaaggccgtggaagttgccaccgtggtgatccagccgacagttctgcgagcagctgtgcccaagawtgtgtctgtggctgaaggaaaggaactggacctgacctgtaacatcacaacasaccgagcckatgacgtccggcccgaggtgacgtggtccttcagcaggatgcctgacagcaccctacctggctcccgcgtgttggcgcggcttgaccgtggattccctggtgcacagctcgcctcatgttgctttgagtcatgtggatgcacgctcctaccatttactggttcggggatgttagcaaagaaaactctggg

SEQ ID NO: 61 - DNA, 494 bp, Homo sapiens
  misc_feature (366): n equals a,t,g, or c
ggcacgagtgaaggaatttctggactcactggcctctaaggggccagaagcccttcaggagttccagcagacagccaccactaccatggtgtaccaacagggtgggaactgcatatacacagacagcactgaagtggctgggtctttgcttgaacttgcctgtccagtcaccaccagtgttcagccacaaacccagcaagaacagcagatccaggttcagcagccgcagcaggttcaggtccaggtgcaggtacagcagtctccgcaacaggtctcggctcarctctccccacaactcaccgttcaccagcctactgagcaacccatccaggtccaggtgcagatccaaggccaggcaccacagtnagcagccccctccattcagaaccccgtctctgacagagtcccagtccctcgtcagctgcaacagcttcagaatccaggtggcagcacgtgcaagcagcccagcagatccaggctgcagaaatcccggt

SEQ ID NO: 62 - DNA, 578 bp, Homo sapiens
gcggccgcctggagctctcggcctcggccttcgacgacggcaacttctcgctgctcatccgcgcggtggaggagacggacgcggggctgtacacctgcaacctgcaccatcactactgccacctctacgagagcctggccgtccgcctggaggtcaccgacggccccccggccacccccgcctactgggacggcgagaaggaggtgctggcggtggcgcgcggcgcacccgcgcttctgacctgcgtgaaccgcgggcacgtgtggaccgaccggcacgtggaggaggctcaacaggtggtgcactgggaccggcagccgcccggggtcccgcacgaccgcgcggaccgcctgctggacctctacgcgtcgggcgagcgccgcgcctacgggcccctttttctgcgcgaccgcgtggctgtgggcgcggatgcctttgagcgcggtgacttctcactgcgtatcgagccgctggaggtcgccgacgagggcacctactcctgccacctgcaccaccattactgtggcctgcacgaacgccgcgtcttccacctgacggtcgccgaaccccacgcggag

SEQ ID NO: 63 - DNA, 1707 bp, Homo sapiens
  misc_feature (21): n equals a,t,g, or c
  misc_feature (1196): n equals a,t,g, or c
  misc_feature (1198): n equals a,t,g, or c
  misc_feature (1210): n equals a,t,g, or c
aattcccttgacggaccgagnaattttttttttttttttttttaaaaccgctttattcaggttggctggtagtcacagactggatcatgtatacagggcaacccacccctaggcaaagccctcggcctctcccacctcccccacgtcatcactgagctgcggcagccagaggtgccagccaattccgaggagaattgggtccaatagaaatatttacaaataaccagggggcaggtgtgcccgtgatcgggaatcgtgagggaactgagtaccagggggcccttggctcccaacagccccaggccctggggcggacttggcacaggacccaagagggagctggggcattggggggccggcagagggggactcctgggagagccttgaaggccctcaaaggggtcctgctggtgcaaaactctgcctggggccatgggtccgagggaaaggcccctcccttctgactcgccgtgtgacagggcagagaatcctggatcccctgcatccctggagggtcgcacagggagctgaacaggaaggactcgccaggaggtggtggggcatctcgctgttcccctaggcctccatgagtgaccctgcagagccactgccccagaagggccctcctgggttccctgggtcttcaccaggggagaggccctagttctgctcagaagattcaagtccatattcagggaggggtcactgtccacacccccaggtccaagtgagggatggtaggaggagggaggcgaggctggggggccccggctcaggacaggatgggggacaagcaagcaaagcaaaacactggactccacagaagctggtgacaggaagggggtggccccgggccccagcatggtccctgccccagtgttcagggcggttggccccttggtgcccagggccaccttctccgagccaggtcaccgcaggggtctgaaagggcaggggtgggtggggcttacatgctgagcaaggggtggtggaaagagggccgacataagaaaacaggcggcctcggggatggggcgcggctggacgcaggcagtcggtccccggtggtccggcagctcctcatgcactctgtacagcgtgggggcggatgggcgggggcaggggcatcagtctagaggctgcaggctcctggtccaccgagcgcttcctcagctccttgcctggctkgggggcgncnggccgggcscgncggraggggcttcgggcagatgcaggacggagttctcccctggctgcacccgcaggtaggccttgaccttgtggtgccgggccttgccgtcgctgaagtcgatgacgcggcactcgtaggtgccttcgtccgtgggcttcacccgggacaggcgcagcttgtgggagatgttgctgcccaccaccttgaccacctggttcgaggcccacgcctgcttgtcggtccagtcccggtggctccgtacataccaccactggatctccagcgagtaggagggggagccgctgccgcggaaggagcaggccatctccacgtcctcgcccgtccgtgctgtcatgtcatggggtgtctctgtgaacagggcgtggccggagacgtggttgtcccagggcgcgtggccggcgggccgcgtggcgccgccgagcggacgcgtgggtcgacccgggaattccggaccggtacctgcaggcgtaccagctttccatatagtgagtggg

SEQ ID NO: 64 - DNA, 425 bp, Homo sapiens
  misc_feature (390): n equals a,t,g, or c
  misc_feature (420): n equals a,t,g, or c
  misc_feature (424): n equals a,t,g, or c
ggaacgggagatgttgcaggcgccgagagggcgggccagggccgcactccggagactcgcggttgctacgcgcaccatggctggaggctccctggcattgggcagtgttacagtgcactcttctgaacctgaagtcagaattcctgagaataatcctgtgaagttgtcctgtgcctactcgggcttttcttctccccgtgtggagtggaagtttgaccaaggagacaccaccagactcgtttgctataataacaagatcacagcttcctatgaggaccgggtgaccttcttgccaactggtatcaccttcaagtccgtgacacgggaagacactgggacatacacttgtatggtctctgaggaaggcggcaacagctatggggagtccangtcaagctcatcgtgcttgtgcctccatcnaggnt

SEQ ID NO: 65 - DNA, 1020 bp, Homo sapiens
tcgagtttttttttttttttttttattagcctaatgttttaatgaagaaacgcatagaaagcacttgctgcacccctggaatctcttgaatccaggaggtggaggctgcccccacccacacacacgaccttgatgccctagtcctcacccaggtcctctgacctcctctcctcttccctcccagtggtcacagcaggcccagctgtgcccaccctccctccaaacggctcagcccaggaaaataaggagccggcccatcctgcaggcaggtgccctctggatctcctgatgcgaagaagaaagaaacccatatggtgagggtccaggaggttcgctgtcattctgttgagtgacttagcttggagccaggaggtggaatgccctcctcccttgtttttcttccccaaggacttcacgtcctcctggccaaaacctcgccaggcatcttctcactcccattttcctggggctctgggcacagcctccatccttgggattggcttcccgggccagtgcaggtgtcggaagtgaagcttcaagggtccaggaccatcccagggtgaggtgaggctaggtgctgggttctatgacaatgagggtggcagtgctgactgcctggcccagcgtgttctcagccacagccttgtactccccgctgtccttcggggatacgctggggatggtgagggagcacacgcccagcaggtcagtgctgtacaccgcggggtttccttccaggctgcggtcattcttgaaccaggtgacgtggggccggggcgagccctgcacggcacagctcatgcagcactcgcagccctggggcagcaggtgggaccgcaggcccaccaggaaccggggcttctggctcaggtcgggctcccggtagcacggagccttcactgtgaacctgtcgcgctgccgggggatgcaccagggctggctggtgtccgagggtttgctggcccccagctcattcttggccaccaccctgaagtggtattcgtgccggggaggcggccc

SEQ ID NO: 66 - DNA, 1665 bp, Homo sapiens
atcgacccacgacgtccgaaaccatggcgtcgctcaaatgtagcaccgtcgtctgcgtgatctgcttggagaagcccaaataccgctgtccagcctgccgcgtgccctactgctcggtagtctgcttccggaagcacaaagaacagtgcaaccctgaaactcgtcctgttgagaaaaaaataagatcagctcttcctaccaaaaccgtaaagcctgtggaaaacaaagtgatgaggaagaagacagagtttctttgcagaatttaaagaatttaggggaatctgcaacattaagaagcttattgctcaatccacacctcaggcagttgatggtcaacctcgatcagggagaagacaaagcaaagctcatgagagcttacatgcaagagcctttgtttgtggagtttgcagactgctgtttaggaattgtggagccatcccagaatgaggagtcttaagatggattattgtgctgcttgctcaagcgtgtgcttgactcctggaacctgcctgctccctctcccagaccagctagtttggggctggggagctcaggcaaaagaggtttccaggatgcagattaggtcatgcaggcctttaccggcattgatgtggctcatgtttcaggcagacttggggtccttaaggtggcaagtcctttatggagagaaaacttgacattcagatgattgtttttaaatgttttacttttggtacagttgatagacatcataaacgatatcaagcttacacttcatatggagttaaacttggtcagtgttaataaaatcaaaacgtgattctactgtacattgcattattcataatttaattgtttgaaattacattaaataaatcaactaattaaatactaaagttttgttcctttttaaaggaaataaccacaagatttttcccagcccaaattccagcgccaattttaggccaactttggctgttttcttccaaaagtgcttatgtggaattgggatccccagtgtagtgacagacagtcatgactgctgctgagtttgatctgtgaaggtagtgaaatgtggccctgatgtttcttaaccctgatttggtaactaccagccctgacaccatcagtgcttgatgtagcctggaaccccaggcccactgacgcactgggcacggggctctgggtcgaaggctggagccgtcactgttgttcatgtgcatttggagcactgtgggaatagtctggcagctgtgtgctgattaaatgtctttggcaaggcagggggcaggaaaaggccttgtggaaacaaaggcaccaaggatcaccccagcccagtgaaggcagaagaggtcacgtggatcagcctgtgtctttccagcagaatctgattaaagcctgtaatgctgtagggtgaaggttcagggcagatgtcagcataccgcagtggagactttctgcagtgaaactttatcgatccctagaggggagagagagatgcagctttagcactagttcctgggagtgccagggcctaacaaccccacagagcagacgctaaaaatgcaagaaggtatggacaagtactagtattgggggccacagcaggattaaaatagcattacatccactcagtgtgagacagatgaggaaaccctaggaggaggcgctccctaagaggaatgc

SEQ ID NO: 67 - DNA, 602 bp, Homo sapiens
gcttctttgggggtgaagagattggggaggaagtctccacccctgggaggcagaagccaggcatagcgcgctggctaggactccagtaccgtgaagggaggcagtgagagcaracatctgtgcctcattcctgatctcaaggggaaagcaagaacaaggatctcgaacctgcggaaggaggaccagtctgtgtacttctgccaagtccagctggacatacagatcagggaggctgtcgtggcagtccatcaaggggacccacctcaccatcacccaggccctcaggcagcccctccacagggcccctctcctgcctggacagctctgctggtctccccgtcccctggagaagaacaaggccatgggtcggcccctgctgctgcccctgctgctcctgctgcagccgccagcatttctgcagcctggtgagtacccaggaccgcccaggtatggtctctgcccaaacccaggaggggccaacccaagacaaaggcagaacatctggggcaggggccaggctcccacctccagcaaacaagggcgggtcccataggggtgggtgccgccatctcttccccctccaccctcccccatgcctgaag

SEQ ID NO: 68 - DNA, 447 bp, Homo sapiens
  misc_feature (431): n equals a,t,g, or c
ggcggaggttgcagtgagccaggatcgtgccactgcactttatttagccaggacaacactctgtctccaaaaaaaagtttctgaaggtaaaagatatactaaaggatatacatatactgcctcttctatgatgtttcatttgacctacaccatcagcatcttcaggaaacagtatgaaactaatttcacattaaatgttgcaaacgtctgcaattctccagtttttagtttgcacgtaaggattcgtaggattgatttcagattgacagatggttgtagtaacaaaaaaatgaattgcctkggagaattcgagttattttaggcctgccttggacacttttatgcacttaattcactggccaattagtctaactcctcaaccatcgtggtatggacttccccagtccccccaatgggaaggcctttgaacnaaccccgagtcagtag

SEQ ID NO: 69 - DNA, 2324 bp, Homo sapiens
gtccgtctgctcgtgcagtaaccagttcagcaaggtggtgtgcacgcgccggggcctctccgaggtcccgcagggtattccctcgaacacccggtacctcaacctcatggagaacaacatccagatgatccaggccgacaccttccgccacctccaccacctggaggtcctgcagttgggcaggaactccatccggcagattgaggtgggggccttcaacggcctggccagcctcaacaccctggagctgttcgacaactggctgacagtcatccctagcggggcctttgaatacctgtccaagctgcgggagctctggcttcgcaacaaccccatcgaaagcatcccctcttacgccttcaaccgggtgccctccctcatgcgcctggacttgggggagctcaagaagctggagtatatctctgagggagcttttgaggggctgttcaacctcaagtatctgaacttgggcatgtgcaacattaaagacatgcccaatctcacccccctggtggggctggaggagctggagatgtcagggaaccacttccctgagatcaggcctggctccttccatggcctgagctccctcaagaagctctgggtcatgaactcacaggtcagcctgattgagcggaatgcttttgacgggctggcttcacttgtggaactcaacttggcccacaataacctctcttctttgccccatgacctctttaccccgctgaggtacctggtggagttgcatctacaccacaacccttggaactgtgattgtgacattctgtggctagcctggtggcttcgagagtatatacccaccaattccacctgctgtggccgctgtcatgctcccatgcacatgcgaggccgctacctcgtggaggtggaccaggcctccttccagtgctctgcccccttcatcatggacgcacctcgagacctcaacatttctgagggtcggatggcagaacttaagtgtcggactccccctatgtcctccgtgaagtggttgctgcccaatgggacagtgctcagccacgcctcccgccacccaaggatctctgtcctcaacgacggcaccttgaacttttcccacgtgctgctttcagacactggggtgtacacatgcatggtgaccaatgttgcaggcaactccaacgcctcggcctacctcaatgtgagcacggctgagcttaacacctccaactacagcttcttcaccacagtaacagtggagaccacggagatctcgcctgaggacacaacgcgaaagtacaagcctgttcctaccacgtccactggttaccagccggcatataccacctctaccacggtgctcattcagactacccgtgtgcccaagcaggtggcagtacccgcgacagacaccactgacaagatgcagaccagcctggatgaagtcatgaagaccaccaagatcatcattggctgctttgtggcagtgactctgctagctgccgccatgttgattgtcttctataaacttcgtaagcggcaccagcagcggagtacagtcacagccgcccggactgttgagataatccaggtggacgaagacatcccagcagcaacatccgcagcagcaacagcagctccgtccggtgtatcaggtgagggggcagtagtgctgcccacaattcatgaccatattaactacaacacctacaaaccagcacatggggcccactggacagaaaacagcctggggaactctctgcaccccacagtcaccactatctctgaaccttatataattcagacccataccaaggacaaggtacaggaaactcaaatatgactcccctcccccaaaaaacttataaaatgcaatagaatgcacacaaagacagcaacttttgtacagagtggggagagactttttcttgtatatgcttatatattaagtctatgggctggttaaaaaaaacagattatattaaaatttaaagacaaaaagtcaaaacaaaaatattttctaacttgtaagttctatttaaagggggtgggggggaatcttgggaacgttgtggggtacaagccacaagttaacttgctatgctgccagaagggatttctggtataaggttgaaattgctgagataaaataaactaaaacaacaaacatccttaaagaggtagggtgtgggctgctgagggggcaagagggatagactgaatctgtcattttttagaagatgcttcataggacacaggactatccatttctacagacatctttcttaagccgagagctgtctttgcagaattatcttattaaaaaaaaaaaaaaaaaaactcga

SEQ ID NO: 70 - DNA, 697 bp, Homo sapiens
  misc_feature (74): n equals a,t,g, or c
  misc_feature (647): n equals a,t,g, or c
  misc_feature (656): n equals a,t,g, or c
  misc_feature (666): n equals a,t,g, or c
cagaggtgctggtggcgcggggagtgcgcgtcaaggtgaacgaggcctaccggttccgcgtggcactgcctgcntacccagcgtcgctcaccgacgtctccctggcgctgagcgagctgcgccccaacgactcaggtatctatcgctgtgaggtccagcacggcatcgatgacagcagcgacgctgtgggaggtcaaggtcaaaggggtcgtctttytctaccgagagggctctgccgctatgctttctccttttctggggcccaggaggcctgtgcccgcattggagcccacatcgccaccccggagcagctctatgccgcctaccttgggggctatgagcaatgtgatgctggctggctgtcggatcagaccgtgagtatcccatccagaccccacgagaggcctgttacggagacatggatggcttccccggggtccggaactatggtgtggtggacccggatgacctctatgatgtgtactgttatgctgaagacctaaatggagaactgttcctgggtgaccctccagagaagctgacattggaggaagcacgggcgtactgccaggagcggggtgcagagattgccascacgggccaactgtatgcagcctgggatggtggcctggaccactgcagcccanggtggctanctgatggcantgtgcgctamcccatcgtcamamccagccag

SEQ ID NO: 71 - DNA, 563 bp, Homo sapiens
  misc_feature (481): n equals a,t,g, or c
tcgacccacgcgtccgctgcagctgtggggagatttcagtgcattgcctcccctgggtgctcttcatcttggattattccttgggcctgaatgacttgaatgtttccccgcctgagctaacagtccatgtgggtgattcagctctgatgggatgtgttttccagagcacagaagacaaatgtatattcaagatagactggactctgtcaccaggagagcacgccaaggacgaatatgtgctatactattactccaatctcagtgtgcctattgggcgcttccagaaccgcgtacacttgatgggggacatcttatgcaatgatggctctctcctgctccaagatgtgcaagaggctgaccagggaacctatatctgtgaaatccgcctcaaaggggagagccaggtgttcaagaaggcggtggtactgcatgtgcttccagaggagcccaaaggtacgcaaatgcttacttaaagaggggncaaagggcaagagctttcatgtgcaagaaggcaaggaaactgattatcttgagtaattgccagcctttggggctaagtactt

SEQ ID NO: 72 - DNA, 1853 bp, Homo sapiens
gatacgccagctctaatacgactcactatagggaaagctggtacgcctgcaggtaccggtccggaattcccgggtcgacccacgcgtccggcctttgctgctcctctctctgcacggtgttgcagcatccctggaagtgtcagagagccctgggagtatccaggtggcccggggtcagacagcagtcctgccctgcactttcactaccagcgctgccctcattaacctcaatgtcatttggatggtcactcctctctccaatgccaaccaacctgaacaggtcatcctgtatcagggtggacagatgtttgatggtgccccccggttccacggtagggtaggatttacaggcaccatgccagctaccaatgtctctatcttcattaataacactcagttatcagacactggcacctaccagtgcctggtcaacaaccttccagacatagggggcaggaacattggggtcaccggtctcacagtgttagttcccccttctgccccacactgccaaatccaaggatcccaggatattggcagcgatgtcatcctgctctgtagctcagaggaaggcattcctcgaccaacttacctttgggagaagttagacaataccctcaaactacctccaacagctactcaggaccaggtccagggaacagtcaccatccggaacatcagtgccctgtcttcaggtttgtaccagtgcgtggcttctaatgctattggaaccagcacctgtcttctggatctccaggttatttcaccccagcccaggaacattggactaatagctggagccattggcactggtgcagttattatcattttttgcattgcactaattttaggggcattcttttactggagaagcaaaataaagaggaggaagaagaagaaattcctaatgaaataagagaggatgatcttccacccaagtgttcttctgccaaagcatttcacactgagatttcctcctcggacaacaacacactaacctcttccaatgcctacaacagtcgatactggagcaacaatccaaaagttcatagaaacacagattcagtcagccacttcagtgacttgggccaatctttctctttccactcaggcaatgccaacataccatccatttatgctaatgggacccatctggtcccgggtcaacataagactctggtagtgacagccaacagagggtcatcaccacaggtgatgtccaggagcaatggctcagtcagtaggaagcctcggcctccacacactcattcctacaccatcagccacgcaacactggaacgaattggtgcagtacctgtcatggtaccagcccagagtcgggccgggtccttggtataggacatgaggaaatgttgtgttcagaaatgaataaatggaatgccctcatacaagggggagggtggggtggggagtgctgggaaagaaacacttccttataattatattagtaaaatgcacaaagaagaaggcagtgctgttacttggccactaagatgtgtaaaatggactgaaatgctccatcatgaagacttgcttccccaccaaagatgtcctgggattctgctggatctcaaagatgtgccaagccaaggaaaaagatacaagagcagaatagtacttaaaatccaaactgccgcccagatgggcttgttcttcatgcctaacttaataatttttaagagattaaagtgccagatggagtttaaaaaaaaaaaaaaaaaaaaaaaaaaaaaaaaaaaaaaaaaaaaaaaaaaaaaaaaaaaaaaaaaaaaaaaaaaaaaaaaaaaaaaaaaaaaaaaaaaaaaaaaaaaaaagggggggcccgtttaaaa

SEQ ID NO: 73 - DNA, 1286 bp, Homo sapiens
gcagctggccctggtactgtgcactgtggacagccgcccgcccgcccagctggccctcagccacgccggtcgcctcttggcctcctcgacagcagcctctgtccccaacaccctgcgcctggagctgcgagggccacagcccagggatgagggtttctacagctgctctgcccgcagccctctgggccaggccaacacgtccctggagctgcggctggagggtgtgcgggtgatcctggctccggaggctgccgtgcctgaaggtgcccccatcacagtgacctgtgcggaccctgctgcccacgcacccacactctatacttggtaccacaacggtcgttggctgcaggagggtccagctgcctcactctcattcctggtggccacgcgggctcatgcaggcgcctactcttgccaggcccaggatgcccagggcacccgcagctcccgtcctgctgccctgcaagtcctctatgcccctcaggaygctgtcctgtcctccttccgggactccagggccagatccatggctgtgatacagtgcactgtggacagtgagccacctgctgagctggccctatctcatgatggcaaggtgctggccacgagcagcggggtccacagcttggcatcagggacaggccatgtccaggtggcccgaaacgccctacggctgcaggtgcaagatgtgcctgcargtgatgacacctatgyttgcacagcccaaaattgctgggctcaatcagcaccatcgggcggttgcaggtagaaggtgcacgcgtggtggcagagcctggcctkgacgtgcctgagggcgctgccctgaacctcagctgccgcctcctgggtggccctgggcctgtgggcaactccacctttgcatggttctggaatgaccggcggctgcacgcggacctgtgcccactctcgccttcacccacgtggctcgtgctcaagctgggatgtaccactgcctggctgagctccccactggggctgctgcctctgctccagtcatgctccgtgtgctctaccctcccaagacgcccaccatgatggtcttcgtggagcctgagggtggcctccggggcatcctggattgccgagtggacagcgagccgctcgccagcctgactctccaccttggcagtcgactggtggcctccagtcagccccagggtgctcctgcagagccacacatccatgtcctggcttcccccaatgccctgagggtggacatcgargcgctgaggcccarcgaccaargggaatacattgtctgcctc

SEQ ID NO: 74 - DNA, 519 bp, Homo sapiens
  misc_feature (7): n equals a,t,g, or c
gcagtanccgacagtaccgtccgaattcccggtcgacccacgcgtccgggttttatgtgttagattcctctgaatataactttcacattttgtcctcttttgtgctaatagaacattctagtatgccagtagaaaaaaatatcactttagaaaggccttctaatgtaaatctcacatgccagttcacaacatctggggatttgaatgcagtaaatgtgacttggaaaaaagatggtgaacaacttgagaataattatcttgtcagtgcaacaggaagcaccttgtatacccaatacaggttcaccatcattaatagcaaacaaatgggaagttattcttgtttctttcgagaggaaaaggaacaaaggggaacattaatttcaaagtccctgracttcatggggaaaaacaagccattgatctcttacgtgggggattctactgtcttgacatgtaaatgkcaaattgtttccttaaattggaccggkacatagtaatgggagtgtaaaggtccgccca

SEQ ID NO: 75 - DNA, 550 bp, Homo sapiens
  misc_feature (1): n equals a,t,g, or c
  misc_feature (524): n equals a,t,g, or c
  misc_feature (534): n equals a,t,g, or c
  misc_feature (537): n equals a,t,g, or c
ntttcgaggactcaccaatctggttcggctaaacctttcggggaatttgttttcttcattatctcaaggaacttttgattatcttgcgtcattacggtctttggaattccagactgagtatcttttgtgtgactgtaacatactgtggatgcatcgctgggtaaaggagaagaacatcacggtacgggataccaggtgtgtttatcctaagtcactgcaggcccaaccagtcacaggcgtgaagcaggagctgttgacatgcgaccctccgcttgaattgccgtctttctacatgactccatctcatcgccaagttgtgtttgaaggagacagccttcctttccagtgcatggcttcatatattgatcaggacatgcaagtgttgtggtatcaggatgggagaatagktgaaaccgatgaatcgcaaggtatttttgttgaaaagaacatgattcacaactgctccttgattgcaagtgccctaaccatttctaatattcaggctggatctactggaaattggngctgcatgtncanaccaacgtgggaa

SEQ ID NO: 76 - DNA, 584 bp, Homo sapiens
  misc_feature (380): n equals a,t,g, or c
  misc_feature (416): n equals a,t,g, or c
  misc_feature (471): n equals a,t,g, or c
  misc_feature (487): n equals a,t,g, or c
  misc_feature (545): n equals a,t,g, or c
gggaccctcgtcatcactgcccttaacaaccacactgtgggacggtaccagtgtgtggcccggatgcctgcgggggctgtggccagcgtgccagccactgtgacactagccaatctccaggacttcaagttagatgtgcagcacgtgattgaagtggatgagggaaacacagcagtcattgcctgccacctgcctgagagccaccccaaagcccaggtccggtacagcgtcaaacaagagtggctggaggcctccagaggtaactacctgatcatgccctcagggaacctccagattgtgaatgccagccaggaggacgagggcatgtacaagtgtgcagcctacaacccagtgacccaggaagtgaaaacctccggctncagcgacaggctacgtgtgcgccgtccaccgctgangctgcccgatcatctaccccccagaggcccaaaccatcatcgtcaccaaagccanagtctcattcttggantgtgtggccagtggaatcccacccccacgggtcacctgggccaaaggatgggtccagngtcaccggctacaacaaagaccgctttcctgcttaacaa

SEQ ID NO: 77 - DNA, 1125 bp, Homo sapiens
  misc_feature (1123): n equals a,t,g, or c
gctgactgtgagtggccccagcaccgtgatgggcgccgtgggggaatccctgagtgttcagtgtcggtatgaagagaaatacaagacgtttaacaaatactggtgcagacaaccatgcttgccaatttggcatgaaatggtggagaccggagggtctgagggagtggtgaggagtgaccaagtgatcatcacggaccatcctggagacctcaccttcaccgtgaccttggagaacctcacggcagacgatgcaggaaaataccgatgtgggattgcaacaatactgcaggaagatggcctgtctggtttcctgcccgatcccttcttccaggttcaagtgctggtctcatcggcctccagtactgagaactctgtgaagacacctgcatctcccaccaggcccagccaatgccaagggtccctgcccagcagcacctgcttcctgcttctcccactcctgaaggtgcctctgctcctgagcatactcggtgctatcctctgggtgaacaggccttggaggactccttggacagagtcatgaacaggagaacttgcaacaccccatgcccattgaaaccctgtccagagacacagcccctctgactgcaaaaaggacttctgaccctgaccctcatatttctttccatcttatcaccggatactttttaaaagttaaaaaaaaatgtaggccgggtgcggtggcttacacctgcaatcccagcactttgggaggccaaggcaggtggatcacttgagtccaggagtttgagagcagcctgggcaacatggtcagacctcatctctacaaaaaaatacaaaaattagcagggtgtggtggtgtatgcctgtgatcccagctacttgggaagctgagacaggaggatcgcttgagccccggaggtggaggttgcattgagtcgagattgtgccactgcactccagcctgggtgacagagggagaccctgtctcagataaacaaataaataaataaaatacatcccatacccaaaaaaaaaaaaaaaaaaaaaaaaaaaaaaaaaaaaaaaaaaaaaaaaaaaaaaaaaaaaaaaaaaaaaaaaaaaaaaaaaaaaaaaaaaaaaaaaaaaaaaaagaaaggggggncc

SEQ ID NO: 78 - DNA, 1020 bp, Homo sapiens
  misc_feature (4): n equals a,t,g, or c
  misc_feature (334): n equals a,t,g, or c
tgtnttcagatttccttgtcttgaggtcctcacaattactctacagctcagaacaccaactgctgaggctgccttgggaagaggatgatcctaaacaaagctctgctgctgggggccctcgctctgaccaccgtgatgagcccctgtggaggtgaagacattgtggctgaccacgttgcctcttgtggtgtaaacttgtaccagttttacggtccctctggccagtacacccatgaatttgatggagatgagsagttctacgtggacctggagaggaaggagactgcctggcggtggcctgagttcagcaaatttggaggttttgacccgcagngtgcactgagaaacatggctgtggcaaaacacaacttgaacatcatgattaaacgctacaactctaccgctgctaccaatgaggttcctgaggtcacagtgttttccaagtctcccgtgacactgggtcagcccaacaccctcatytgtcttgtggacaacatctttcctcctgtggtcaacatcacatggctgagcaatgggcactcagtcacagaaggtgtttctgagaccagcttcctctccaagagtgatcattccttcttcaagatcagttacctcaccttcctcccttctgctgatgagatttatgactgcaaggtggagcactggggcctggaccagcctcttctgaaacactggggtgcatcgccatctacaggaacagaagaatggacttgctaaatgacctagcactattctctggcccgatttatcatatcccttttctcctccaaatgtttctcctctcaccttttctctgggacttaagctgctatatcccctcagagctcacaaatgcctttacattctttccctgacctcctgattttttttttcttttctcaaatgttacctacaaagacatgcctggggtaagccacccggctmcctaattcctcagtaacctccatctaaaatctccaaggaagcaataaattccttttatgagatctaaaaaaaaaa

SEQ ID NO: 79 - DNA, 328 bp, Homo sapiens
  misc_feature (279): n equals a,t,g, or c
  misc_feature (319): n equals a,t,g, or c
ggaagaacagggcggggcctgaggcagagaagaggcttcgcagagggccggaggaggacggtccctgggggccctgggaccgccgaggggcccgcagccagggcaaaggtcgccgggcccggcccacctcccctgagctcgagtcttcggatgactcctacgtgtccgctggagaagagcccctagaggcccctgtgtttgagatccccctgcagaatgtggtggtggcaccaggggcagatgtgctgctcaagtgtatcatcactgccaaccccccgncccaagtgtcctggcacaaggatgggtcagcgctgcgcancgagggccg

SEQ ID NO: 80 - DNA, 539 bp, Homo sapiens
  misc_feature (12): n equals a,t,g, or c
  misc_feature (509): n equals a,t,g, or c
  misc_feature (527): n equals a,t,g, or c
  misc_feature (530): n equals a,t,g, or c
  misc_feature (537): n equals a,t,g, or c
ggggacccgaangcagctctcccaggctgcatgtggctgtggcccccaacacactgcgtctggagatccacggggctatgctggaggatgagggtgtctatatctgtgaggcctccaacaccctgggccaggcctcggcctcagctgacttcgacgctcaagctgtgaatgtgcaggtgtggcccggggctaccgtgcgggaggggcagctggtgaacctgacctgccttgtgtggaccactcamccggcccagctcacctacacatggtaccaggatgggcagcagcgcctggatgcccamtccatccccctgcccaacgtmamartcagggatgscamctcctaccgytgsggtktgggsccccctggtcgggcaccccgcctctccagacctatcaccttggacgtctctacgcgccccgcaacctgcgcctgacctacctcctggagagccatggcggcagctgccctggtactgtgcactgtggacaggcgccgcccgcccagntgccctaaccacgccggncgncttttgnct

SEQ ID NO: 81 - DNA, 595 bp, Homo sapiens
  misc_feature (304): n equals a,t,g, or c
  misc_feature (321): n equals a,t,g, or c
  misc_feature (405): n equals a,t,g, or c
  misc_feature (524): n equals a,t,g, or c
  misc_feature (575): n equals a,t,g, or c
cttccatttaattttgtagatccaaatatggattcaagggagggagaagacaaagaactaaaaattgatttagaagtatttgaaatgcctcctcgctttataatgcctatttgtgattttaaaattccagaaaattcagatgctgtattcaaatgttcagtcatagggatcccgactcccgaagttaagtggtataaagaatatatgtgtattgagccagataatattaaatacgtgattagcgaggagaagggaagtcacactcttaaaattcgaaatgtctgtctttctgatagtgcacatnrcaggtgcagagctgtngaattgtgtaggagaggctatctgtcggggattcctcaccatgggagattctgaaatatttgctgtgatagcaaagaaaagcanagtgactttaagcagtttaatggaagaattggtcttaaagagcaactacacagacagtttttttgaatttcaggtggtggaagggcctcccaggtttatcaaaggtattttctgactgntatgcaccaataggtacagcagcatattttcagtgcttagtcgtggctctncaaaaccacggttactggtc

SEQ ID NO: 82 - DNA, 837 bp, Homo sapiens
agctccatcgcccccccycaacaamaaaaaaagtttcccatacactggcctgccccaaaacccactaacaattttagcaaaacagtccaggccaaagaggaagcatttcatgttcaataagaaacccagccattccgcatggctggttcctgagtggctctggtgatactctccagccacctgctgacattsagaatctcagacctcgggactgctgttgcggtaccgtgtgtctgacacctgccagcagccctttgctatctgcgcgcaggatgggggtgactgcccagacattcccgctagataggctctgatttccggggcagcctttcagatgcggcagacatacaacacctgtactttagagttttaagggaaaaaaaaatcagaagtgctggttagatagtaaaaacttaggataacttagaaaggctagttttagcttcctttgtggctccctggtgcaaaacaattagcagttatgcaatggacctgattctagtttattctaattaagaagtgaggccgrgtttgacttcgttcctgaatacaatcttgagtaactgggaaagtctgagtgaaaggatggcctcattctctttctaatcttgctggtttcaagattagaaaatggcattatttgatctgaaatgtttgagaagacacgaataaagttacttgggcagacttggcttgctttctttcctttacacatacctgttattttcaaagcagaatatttttcatgaaaacacacccaatttaaagaacaagaataaaatgaagcaaggtgtcccccccccctatgccaggcaaaaaaaaaaaaaaaaaaaaaaa

SEQ ID NO: 83 - DNA, 1083 bp, Homo sapiens
gcttttgcaaagctatttaggtgacactatagaaggtacgcctgcaggtaccggtccggaattcccgggtcgacccacgcgtycgcccacgcgtccggggtggcacatatacattgagggacctgaaagagaagtgattgtggacgatcagcaatcctgtgacattaacatgtgatgccactgggatcccacctcccacgatagcatggttaaagaaccacaagcgcatagaaaattctgactcactggaagttcgtattttgtctggaggtagcaaactccagattgcccggtctcagcattcagatagtggaaactatacatgtattgcttcaaatatggagggaaaagcccagaaatattactttctttcaattcaagttcctccaagtgttgctggtgctgaaattccaagtgatgtcagtgtccttctaggagaaaatgttgagctggtctgcaatgcaaatggcattcctactccacttattcaatggcttwaagatggaaagcccatagctagtggtgaaacagaaagaatccgagtgagtgcaaatggcagcacattaaacatttatggagctcttacatctgacacggggaaatacacatgtgttgctactaatcccgctggagaagaagaccgaatttttaacttgaatgtctatgttacacctacaattaggggtaataaagatgaagcagagaaactaatgactttagtggatacttcaataaatattgaatgcagagccacagggacgcctccaccacagataaactggctgaagaatggacttcctctgcctctctcctcccatatccggttactggcagcaggacaagttatcaggattgtgagagctcaggtgtctgatgtcgctgtgtatacttgkgtggcctccaacagagctggggtggataataagcattacaatcttcaagtgtttgcacctcgaaaaaaaaaaaaaaaaaaaaaaaaaaaaaaaaaaaaaaaaaaaaaaaaaaaaaaaaaaaagggcggccgctctagaggatccctcgaggggccccaagttacgcgtgcatgcgacgtcatagctctca

SEQ ID NO: 84 - DNA, 1451 bp, Homo sapiens
  misc_feature (673): n equals a,t,g, or c
  misc_feature (1209): n equals a,t,g, or c
  misc_feature (1215): n equals a,t,g, or c
cttttgcaaaaagctatttaggtgacactatagaaggtacgcctgcaggtaccggtccggaattcccgggtcgacccacgcgtccgcccacgcgtccgcccacgcgtccgtgactgcagaacattctggaaactactcctgtgatgcagacaatggcctgggggcccagcacagtcatggagtgagtctcagggtcacagttccggtgtctcgccccgtcctcaccctcagggctcccggggcccaggctgtggtgggggacctgctggagcttcactgtgagtccctgagaggctccttcccgatcctgtactggttttatcacgaggatgacaccttggggaacatctcggcccactctggaggaggggcatccttcaacctctctctgactacagaacattctggaaactactcatgtgaggctgacaatggcctgggggcccagcacagtaaagtggtgacactcaatgttacaggaacttccaggaacagaacaggccttaccgctgcgggaatcacggggctggtgctcagcatcctcgtccttgctgctgctgctgctctgctgcattacgccagggcccgaaggaaaccaggaggactttctgscactggaacatctagtcacaagtcctagtgagtgtcaggagccttyctcgtccargccttncaggatagaccctyaagagcccactyactytaaaccactasccccaatggarctggagccaatgtacagcaatgtaaatcctggagatagcaacccgatttattyccagatytggagcatccagcatwcaaaagaaaactcagctaattgtccaatgatgcatcaagagcatgaggaacttacagtcctctattcagaactgaagaagacacacccagacgactctgcaggggaggctagcagcagaggcagggcccatgaagaagatgatgaagaaagctatgagaatgtaccacgtgtattactggcctcagaccactagccccttacccagagtggcccacaggaaacagcctgcaccatttttttttctgttctctccaaccacacatcatccatctctccagactctgcctcctacgaggctgggctgcagggtatgtgaggctgagcaaaaggtctgcaaatctcccctgtgcctgatctgtgtgttccccaggaagagagcaggcagcctctgagcaagcactgtgttnttttcncagtggagacacgtggcaaggcaggagggccctcagctcctagggctgtcgaatagaggaggagagagaaatggtctagccagggttacaagggcacaatcatgaccatttgatccaagtgtgaccgaaagctgttaatgtgctctctgtataaacaatttgctccaaaaaaaaaaaaaaaaaaaaaaaaaaaaaaaagggcggccgctctagaggatccctcgaggggccacaaa

SEQ ID NO: 85 - DNA, 2019 bp, Homo sapiens
ggcacgagggcacccaggcctccatggtgtgcggagtgacccatgacccccgagtaaacatcaggtacatctgggagaaggacggggccaccctgggcacggagagccatcctcgtatccgcctggacagaaacggctccctgcacatctcacagacgtggtcgggagacatcggcacgtacacctgccgggtgatctcagcaggaggcaacgactctcgcagtgcccacctgcgagtcaggcaactgccccacgcgcccgagcacccagtggccactctcagcaccgtggaaaggcgagccatcaacctgacgtggaccaagccctttgatggcaacagccccctgatccgctacattctggagatgtcggagaacaatgccccctggactgtactcctggccagtgtggaccccaaagctacctcagtgacagtcaagggcctggttcctgcacgctcctaccagttccgtctttgtgccgtcaacgacgtggggaaaggacagttcagcaaagacaccgagagggtctccctccccgaggagccccccacggccctccacagaacgtcatcgccagcggtcgaaccaaccagtccatcatgatccagtggcagccgccttctgagagccaccagaatggaattctcaagggttacatcatcaggtactgcctggccgggctgcccgtggggtaccagtttaagaacatcacggatgctgatgtgaacaacctgctgctggaggatctcatcatttggaccaactacgagatcgaggtggctgcttacaacagcgctgggctgggggtctacagcagtaaagtcaccgagtggacgctgcagggagttcccacagtccctccgggcaatgtgcacgcggaagccaccaattccacgaccatccgcttcacctggaacgcccccagcccccagttcatcaacggcatcaaccagggctacaagctgatcgcctgggagccggaacaggaagaggaggttaccatggtgaccgcccggcctaactttcaagacagcatccacgtgggcttcgtgtctggcctgaagaagttcaccgagtacttcacctcagtgctgtgtttcaccacccccggggacgggccacgcagcaccccgcagctggtgcgcacccatgaggatggtaggcaccccccagccctgctctttctgcccccccccgcccaaggccaggctgggcgccccaggcagaagggtggcccaggcttgtctcccaggctgagatacccccagattaccacaggctatctcacagatggtggtctctctctggctctaactggccttggggggtgggggttcctttggggtgcagtgcctgggcccgtgggacacctgagcttcagtgagatcctggacacatcgctgaaggtcagctggcaagagccgggagagaaaaatggcatcctcacagggtaccggatctcctgggaggagtacaatcgaaccaacacccgtgtgacccactacctgcccaacgtgaccctggagtaccgtgtcacgggcctcaccgcgctcaccacctacaccatcgaggtggccgccatgacctcaaagggccagggccaagtgtccgcctccaccatctcctctggggtgcccccaggtaagtgcccactctcaaggcaggactctttgagttctcctgagcagcgtcccattcaagaggccccttgtcggctgggcgtggtggctcatgcctgtagtcccagcaccttgggaggctgaggcaggcgtatcacttgaggtcaggagttcgagaccagcctggccaacgtggtaaaaccctactaaaaatacaaaaattagccagctgtggtggtgcatgcttgtgatcccagttagttgggaggctgaggatggaagatcgcttgaacccaggaggtagaggttgcagcgagccgagatcacaccactgcactccagtctgggtgacagggccacatcgcgtctcaaaaaaaaaaaaaaaaaaaactcgaggg

SEQ ID NO: 86 - DNA, 786 bp, Homo sapiens
  misc_feature (458): n equals a,t,g, or c
  misc_feature (735): n equals a,t,g, or c
  misc_feature (740): n equals a,t,g, or c
  misc_feature (762): n equals a,t,g, or c
  misc_feature (774): n equals a,t,g, or c
taatacgactcactatagggaaagctggtacgcctgcaggtaccggtccggaattcccgggtcgacccacgcgtccgcctcaacattcctcattattgaccctctcttgggacttttgaagattcaagaaacacaagatctggatgctggcgattatacctgtgtagccatcaatgaggctggaagagcaactggcaagataactctggatgttggctcacctccagttttcatacaagaacctgctgatgtgtctatggaaattggctcaaatgtgacattaccttgctatgttcagggttatccagaaccaacaatcaaatggcgaagattagacaacatgccaattttctcaagacctttttcagttagttccatcagccaactaagaacaggagctctctttattttaagtaggttgaaggaaatatattttgtacgaatatgtacttttatgntatatatttatgctttatacataggtattgctatttaaaatagtatattaatcttgccaacacattttatgttcattgcattttactttgaaatagtactggcattttatattcgggaattgtcataaatgagttatattttattcaaatgtatgtcattaatttatcataagggcttatgaaacaatatgacttcttcatatcttaccatttcttattgcaaatagagtcatctgagcctttacatagataagtggcacattaccttgattcttgnaacanttgctgtatagaaagataaaanattactattagntaactctattta

SEQ ID NO: 87 - DNA, 702 bp, Homo sapiens
  misc_feature (587): n equals a,t,g, or c
  misc_feature (661): n equals a,t,g, or c
  misc_feature (670): n equals a,t,g, or c
gagaaagagacaaagagcccctacaggaacgctttttccgaccacatttcctgcaggctcctggggatatggtagctcatgaggggcgcctctgtcggctggactgtaaggtgagtggtttacgcccccggagctgacatggctactcaatggccaacctgtgctaccagatgcctcccacaagatgctggtcagggagaccggagtccactctctgctcattgacccactcactcagcgcgacgagggacctataagtgcatcgctaccaacaaaaccgggcagaattcttttagtctggagctctctgtagtagccaaagaggtgaagaaagcacctgtgatcctggagaaactacagaactgcggtgttcccgaaggccaccccgtgagactggagtgccgcgtgataggcatgcccccacctgtgttctactggaagaaagacaatgagaccatcccttgcaccagagagaggatcagtatgcaccaggacacaacagggtatgcctgccttctcattcagccagccaagaaatcagacgctggatggtacacgttgtcagccaagaatgaagccggcatcgngtcgtgcactgccaggctggatatatacgctcagtggcaccatcagatcccacsgccatgtctgccggcccagnggcagtcgntacggatctctaacagtaaaggacttgacata

SEQ ID NO: 88 - DNA, 541 bp, Homo sapiens
  misc_feature (505): n equals a,t,g, or c
  misc_feature (519): n equals a,t,g, or c
gttccgggcagggaatgatataagctggaaggctccagtggccacaaacaacccagcttgggcagtgcaggaggaaactcgggaccgattccacctccttggggacccacagaccaaaaattgcaccctgagcatcagagatgccagaatgagtgatgcggggagatacttctttcgtatggagaaaggaaatataaaatggaattataaatatgaccagctctctgtgaacgtgacagccccagcaccacggcaccagcctcacctgtcaggtgaccttgcctggggccggcgtgaccacgaacaggaccatccaactcaatgtgtcctaccctcctcagaacttgactgtgactgtcttccaaggagaagggcacagcatccacagctctgggggaacarcttcatctctttcagtcctagaggggccagtctctgcgcttggtctgtgtgttgacagaatccccctgccaggctgagctggactggaggagttgacctgtanccctcacagccttnaaacctctggtatggagctgca

SEQ ID NO: 89 - DNA, 735 bp, Homo sapiens
  misc_feature (728): n equals a,t,g, or c
  misc_feature (731): n equals a,t,g, or c
gacaacgtccagccgttccttcaagcactcccgctctgctgccgtcacctcagagttccacttggtgcctagccgcagcatgaatgggcagccactgacttgtgtggtgtcccatcctggcctgctccaggaccaaaggatcacccacatcctccacgtgtccttccttgctgaggcctctgtgaggggccttgaagaccaaaatctgtggcacattggcagagaaggagctatgctcaagtgcctgagtgaagggcagccccctccctcatacaactggacacggctggatgggcctctgcccagtggggtacgagtggatggggacactttgggctttcccccactgaccactgagcacagcggcatctacgtctgccatgtcagcaatgagttctcctcaagggattctcaggtcactgtggatgttcttgacccccaggaagactctgggaagcaggtggacctagtgtcagcctcggtggtggtggtgggtgtgatcgccgcactcttgttctgccttctggtggtggtggtggtgctcatgtcccgataccatcggcgcaaggcccagcagatgacccagaaatatgaggaggagctgaccctgaccagggagaactccatccggaggctgcattcccatcacacggaccccaggagccarccggaggaragtgtagggctkaragccgagggccaccctgatagtctyaaggrcaacaatngtntttg

SEQ ID NO: 90 - DNA, 786 bp, Homo sapiens
  misc_feature (692): n equals a,t,g, or c
  misc_feature (747): n equals a,t,g, or c
  misc_feature (757): n equals a,t,g, or c
  misc_feature (783): n equals a,t,g, or c
tttttttttttttttttttttttttttttttttttttctcataaaagagaataggactttattagcattggtgcagacattgtattacacaggaatgggtccctagcttgcacaaccccagctgagctttcagcagataaatcacagcagaaatagaatcaccctaggactttcaatcaaaagctggaagtccaccttacagaaagacaaaaagaaacccctttttatatcttaacaaagcaatagctctcaagcagcagagcatctcgaggaagaaagcttgcccggtcgccatcccatcatgccagagcgtgcagtgtccacccttgactacgctggggaattgctgattttttgaaaaagcttaacttaacaatttctgatgtctatcttttagagttctgtatgttcccattttttattcttctgaattttgaattgcaagtagctgtaaaatccaatctttgagtgcatggggcctggcaggtggtgtgggcatcccagcccctgggcaccagggtcagcagctggggcgtgtgctgctccacaaattgcttgcacttttccctgtccagccaggagtggctggtttttcctgagcccagccctgggaggtcgtggtaggtgtggaggctgcagagctcctccagatgctgccctcgctgtgcctcacaccagagaggatggaagtnggctctggtgtcagactgtggttgagctgagacagacaaagccgacacagggctnggggcccgtngtccaccagtggaagtgactgccgangaa

SEQ ID NO: 91 - DNA, 1574 bp, Homo sapiens
  misc_feature (1283): n equals a,t,g, or c
  misc_feature (1348): n equals a,t,g, or c
  misc_feature (1544): n equals a,t,g, or c
  misc_feature (1546): n equals a,t,g, or c
ggcacgagcgaggactctggttcctacaacttccgcttcgagatcagtgaggtcaaccgctggtcagatgtgaaaggcaccttggtcacagtaacagaggagcccagggtgcccaccattgcctccccggtggagcttctcgagggcacagaggtggacttcaactgctccactccctacgtatgcctgcaggagcaggtcagactgcagtggcaaggccaggaccctgctcgctctgtcaccttcaacagccagaagtttgagcccaccggcgtcggccacctggagaccctccacatggccatgtcctggcaggaccacggccggatcctgcgctgccagctctccgtggccaatcacagggctcagagcgagattcacctccaagtgaagtatgcccccaagggtgtgaakatcctcctcagcccctcggggaggaacatccttccaggtgagctggtcacactcacctgccaggtgaacagcagctaccctgcagtcagttccattaagtggctcaaggatggggtacgcctccaaaccaagactggtgtgctgcacctgccccaggcagcctggagcgatgctggcgtctacacctgccaagctgagaacggcgtgggctctttggtctcaccccccatcagcctccacatcttcatggctgaggtccaggtgagcccagcaggtcccatcctggagaaccagacagtgacactagtctgcaacacacccaatgaggcacccagtgatctccgctacagctggtacaagaaccatgtcctgctggaggatgcccactcccataccctccggctgcacttggccactagggctgatactggcttctacttctgtgaggtgcagaacgtccatggcagcgagcgctcgggccctgtcagcgtggtagtcaaccacccgcctctcactccagtcctgacagccttcctggagacccaggcgggacttgtgggcatccttcactgctctgtggtcagtgagcccctggccacactggtgctgtcacatgggggtcatatcctggcctccacctcyggggacagtgatcacagyccacgcttcagtggtacctctggtcccaactccctgcgcctggagatccgagacctggaggaaactgacagtggggagtacaagtgctcagccaccaactcccttggaaatgcaacctccaccctggacttccatgccaatgccgcccgtctcctcatcagcccggcagccgaggtggtggaaggacaggcagtgacactgagctgcanaagcggcctaagccccacacctgatgcccgcttctcctggtacctgaatggagccctgcttcacnagggtcccggcagcagcctcctgctccccgcggcctccagcactgacgccggctcataccactgccgggcccgggacggccacagtgccagtggcccctcttcgccagctgttctcactgtgctctacccccctcgacaaccaacattcaccaccaggctggaccttgatgccgctggggccggggctggacggcnangcctccttttgtgccgtgtggacagcga

SEQ ID NO: 92 - DNA, 1145 bp, Homo sapiens
  misc_feature (1): n equals a,t,g, or c
  misc_feature (4): n equals a,t,g, or c
  misc_feature (245): n equals a,t,g, or c
  misc_feature (895): n equals a,t,g, or c
nggncccccccttttttttttttttttttttttttttttttttttttcacattagaacaacgtgagtttttattttttctccatttctgggactaaactaaagcccaccacaccccatggtgaagctcgagggtggtgcggggctgctctggcgtctgtgaaggcttatggtgttgggggcgccagctacgtcgggacgcagatccaggccagttgggtctccaggcctcagggcggcagcgganccccggacagcaggccgctctttctttttgtgttggagtcccagggcccgggccaccagccgccgggccacagtcgcatttgtctgtggcctctccttcaccagacgcaggagttttggcctctgcaaggctttgagctttgactgcttggttccctgygtgaggggccggatcttgagcaccgagaactcccgggtcagggcttccgcagctgaggccmggcagggaaagatgccgagtgcgtgagtatcatccacccactgaatcctgaaccccttctcttggaactcagaaaacgttgccagcaggtcctccgtcttgagcgctggttcaaagtcatagatctctaccacgtgggcaaggtccttctctccaggcagctcctccaygaaggaggaygtgtccaaatggatcttctctatctgaatctccttcttcgtcaggttgtctgtgatctcctgcagcagctcactgtaatcgtcctccgagcagctgctggggccatcctcttccacctcctcttcgtcctcttcctcctctgccaccagcctcttctccaacagactctccttcccttttccaggtctagctgcagggtggacccaaaccgtgtggccatctccaccatgtctcccttccctgactgactntcaggccccagaggctcagggccaacagggtccagcagtggctcattctcacacctttgtcctgggccctttaggtcctctgttccctgagtcatcagcacagggagtccctgatcagagttggggtctccagcaccaacatctccaggctcttctgggtccctgccagctggggcctctctcttgagcaccgaggtagaggtcagcccccattcttcctgcctgctggggcaggaggcaggagcgcggc

SEQ ID NO: 93 - DNA, 836 bp, Homo sapiens
  misc_feature (760): n equals a,t,g, or c
tatacgcccgctcgaaattaaccctcactaaagggaacaaaagctggagctccaccgcggtggcggccgctctagaactagtggatcccccgggctgcaggaattccctttcaagtcaacttcagatgtcactgacaaacttactatagactggacatatcgccctcccagcagcagccacacagtatcaatatttcattatcagtctttccagtacccaaccacagcaggcacatttcgggatcggattmctgggytggaaatgtatacaaaggggatgcatctataagtataagcaaccctaccataaaggacaatgggacattcagctgtgctgygaagaatcccccagatgtgcatcataatattcccatgacagagctaacagtcacagaaaggggttttggcaccatgctttcctctgtggcccttctttccatccttgkctttgtgccctcagccgtggtggttgctctgctgctggtgagaatggggaggaaggctgctgggctgaagaagaggagcaggtctggctataagaagtcatctattgaggtttccgatgacactgatcaggaggaggaagaggcgtgtatggcgaggctttgtgtccgttgcgctgagtgcctggattcagactatgaagagacatattgatgaaagtctgtatgacacaagaagagtcacctaaagacaggaaacatcccattccactggcagctaagcctgtcagagaaagtggagctggcctggaccatancgatggacaatcctggagatcatcagtaaaggacttttaggaacccacttaattattgaataaaatggttcttggt

SEQ ID NO: 94 - DNA, 1641 bp, Homo sapiens
gagccggtttcttgaagcagctggaagtcctggatagttcccacctgaaagtctgtttgcaaaggcaatgcgcactcaggcaccagagggcagaggggctcaagttccagggttttaaggtgcttggaactcccaggagcctggcaaaccttcatccagaacctcttcctcaagcaagacaaaaagctgctaagcactgctccctccgtctctgtgaagagaccagcttctaacagacggtgccgggctgaccccccatcatgccaggctggctcaccctccccacactctgccgcttccttctttgggccttcaccatcttccacaaagcccaaggagacccagcatcccacccgggcccccactacctcctgccccccatccacgaggtcattcactctcatcgtggggccacggccacgctgccctgcgtcctgggcaccacgcctcccagctacaaggtgcgctggagcaaggtggagcctggggagctccgggaaacgctgatcctcatcaccaacggactgcacgcccgggggtatgggcccctgggagggcgcgccaggatgcggagggggcatcgactagacgcctccctggtcatcgcgggcgtgcgcctggaggacgagggccggtaccgctgcgagctcatcaacggcatcgaggacgagagcgtggcgctgaccttgagcttggagggtgtggtgtttccgtaccaacccagccggggccggtaccagttcaattactacgaggcgaagcaggcgtgcgaggagcaggacggacgcctggccacctactcccagctctaccaggcttggaccgagggtctggactggtgtaacgcgggctggctgctcgagggctccgtgcgctaccctgtgctcaccgcacgcgccccgtgcggcggccgaggccggcccgggatccgcagctacggaccccgcgaccggatgcgcgaccgctacgacgccttctgcttcacctccgcgctggcgggccaagtgttcttcgtgcccggcggctgacgctgtctgaagcccacgcggcgtgccggcgacgcggcgccgtggtggccaaggttgggcacctctacgccgcctggaagttttcggggctagaccagtgcgacggcggctggctggctgacggcagtgtgcgcttcccaatcaccacgccgaggccgcgctgcggggggctcccggatcccggagtgcgcagtttcggcttccccaggccccaacaggcagcctatgggacctactgctacgccgagaattaggcgcccaccgtgtcccctccagcgcgcgcgaagaagcttgggagtcgtggcgggggtctctcgccacccctttccggagagcctcccctccctccagacccggagcggcctctccagacctgccttcccagccgggggctgcgggcctcggaccccggctggcccggcggcggggaggggaggcgggggcgcctccggcggcgagatgcagaggtgaccctcggacccgctgccgttcgcgaaccctagcagaggactcagccaccgccgaggggagggtgaggcggccgggggcattaactgacctctgagtacagcaataaaataacctggggatctttaaaaaaaaaaaaaaaaaa

SEQ ID NO: 95 - DNA, 854 bp, Homo sapiens
  misc_feature (4): n equals a,t,g, or c
  misc_feature (5): n equals a,t,g, or c
  misc_feature (33): n equals a,t,g, or c
  misc_feature (59): n equals a,t,g, or c
tttnncttcgtattgacaaagatgacaacactngcccagaggacctccgcttcctaatnaaatgaatgctgaggaactggtgctgagcctagggcccagccataaatatgttttgttttcttatctgtgattgcaggggggaagcagcccataaatggtctttgcctgaaatggtgagtaaggaaagcgaaaggctgagcataactaaatctgcctgtggragaaatggcaamcaattctgcagtactttaaccttgaacacagctcargcaaaccacactggcttctacagctgcaaatatctagctgtacctacttcaaagaagaaggaaacagaatctgcaatctatatatttattagtggtaagacttccattttctacattctgtttgcttttgctttgcaaatgagtcataaatctaccctgatccattggaaaggttgctttcctagtgagtatgaaagaaacgggttaggaaagagattccatcctagttgtagacactttcgtggatgtcaattttaaccagaattgtcaaggcccagttagtcactatgtgctccacaaagagagagactggtctgtataggtcacctctgtacccacagctcctagcacagtatgtggcccatagttggatgaataagtgaataaaaggattttagttctatttcttagttattgagaagcccaaaatagaatacatgatttttgtcatttaacacagctgcattctcttatatgttggaactgtaaaatactgttgttctactaaattaataaacgcaatgttgctgttatctcgagtgttatataactggtccaatggacaatgttgtattattcatgttc

SEQ ID NO: 96 - DNA, 383 bp, Homo sapiens
  misc_feature (340): n equals a,t,g, or c
  misc_feature (344): n equals a,t,g, or c
gaattcggcacgagattccctggcagagtaaaaaggtagggacctcagtgatctcctgtgatctgcaaagtgcaaaccataggcatccagcttcccatgaaaggggattcayggggaagggagagcattactcactcagggaaatgggggaagggatgcccaaatagttctgcatctttattctgagtattgttctacagcttttctgaatgtgttgctttcccgtaaagaggaagatgactacacttaagagaggacctccgcttcctaataaaatgaatgctggaggaactggtgctkgagcctagggcccagccataaataatgtttttgtttttcnttancctgtggatttgccaggggggggaagcagccccataaat

SEQ ID NO: 97 - DNA, 1001 bp, Homo sapiens
  misc_feature (2): n equals a,t,g, or c
  misc_feature (3): n equals a,t,g, or c
  misc_feature (11): n equals a,t,g, or c
  misc_feature (14): n equals a,t,g, or c
  misc_feature (28): n equals a,t,g, or c
  misc_feature (990): n equals a,t,g, or c
  misc_feature (993): n equals a,t,g, or c
  misc_feature (996): n equals a,t,g, or c
  misc_feature (1000): n equals a,t,g, or c
  misc_feature (1001): n equals a,t,g, or c
anncacggacncgnttgtggtttgtagnagacaggcctcaaattaatgggaaatacatattgcatgacaatggcaccttagtcattaaagaagcaacagcttatgacagaggaaactatatctgtaaggctcaaaatagtgttggtcatacactgattactgttccagtaatgattgtagcctaccctccccgaattacaaatcgtccacccaggagtattgtcaccaggacaggggcagcctttcagctccactgtgtgccttgggagtcccaagccagaaatcacgtgggagatgcctgaccactcccttctctcaacggcaagtaaagagaggacacatggaagtgagcagcttcacttacaaggtaccctagtcattcagaatccccaaacctccgattctgggatatacaaatgcacagcaaagaacccacttggtagtgattatgcagcaacgtatattcaagtaatctgacatgaaataataaagtcaacaacatctgggcagaatttattttttggaagaagtttaatcaaaggcagccataggcatgtaaatgaatttgaatacatttacagtattaaatttacaatgaacatgcaaaataaaaggacttgtaaataaatgcattatgaactgatgatactgatttatttaatggatctcaaaacaaacttttaacttaaggcacttttattttgccaacaaataacaataaacaaacattgaaacggttcactataaaataacaaatggctaatgtacctgaatttttcagtaaaaaaatgaacttctaataccagttgcctagtgtccacctcctatcaatgttacaagcatggcactcagaacagagacaatggaaaatattaaatctgcaatctttatgatgtaaatttaccatcctgatgtataaatattttgtggtttataaatttttttgcyaaaaccyacagaaaawaaaaaaaaaaaactcgagggggggcngcntancggnn

SEQ ID NO: 98 - DNA, 461 bp, Homo sapiens
ctgaaacctgccaaaattgaccacaagcagtattttagaaagcaagtgctccatgggaaagatttccaagtagattgcaaagcttccggctccccagtgccagagatatcttggagtttgcctgatggaaccatgatcaacaatgcaatgcaagccgatgacagtggccacaggactaggagatatacccttttcaacaatggaactttatacttcaacaaagttggggtagcggaggaaggagattatacttgctatgcccagaacaccctagggaaagatgaaatgaaggtccacttaacagttataacagctgctccccggataaggcagagtaacaaaaccaacaagagaatcaaagctggagacacagcttgtccttgactgtgaggtcactggggatcccaaaccaaaaatattttggttgctgccttccaatgacatgatttccttctccattg

SEQ ID NO: 99 - DNA, 2622 bp, Homo sapiens
ggcacgagtagagccgatctcccgcgccccgaggttgctcctctccgaggtctcccgcggcccaagttctccgcgccccgaggtctccgcgccccgaggtctccgcggcccgaggtctccgcccgcaccatgcggctgggcagtcctggactgctcttcctgctcttcagcagccttcgagctgatactcaggagaaggaagtcagagcgatggtaggcagcgacgtggagctcagctgcgcttgccctgaaggaagccgttttgatttaaatgatgtttacgtatattggcaaaccagtgagtcgaaaaccgtggtgacctaccacatcccacagaacagctccttggaaaacgtggacagccgctaccggaaccgagccctgatgtcaccggccggcatgctgcggggcgacttctccctgcgcttgttcaacgtcaccccccaggacgagcagaagtttcactgcctggtgttgagccaatccctgggattccaggaggttttgagcattgaggttacactgcatgtggcagcaaacttcagcgtgcccgtcgtcagcgccccccacagcccctcccaggatgagctcaccttcacgtgtacatccataaacggctaccccaggcccaacgtgtactggatcaataagacggacaacagcctgctggaccaggctctgcagaatgacaccgtcttcttgaacatgcggggcttgtatgacgtggtcagcgtgctgaggatcgcacggacccccagcgtgaacattggctgctgcatagagaacgtgcttctgcagcagaacctgactgtcggcagccagacaggaaatgacatcggagagagagacaagatcacagagaatccagtcagtaccggcgagaaaaacgcggccacgtggagcatcctggctgtcctgtgcctgcttgtggtcgtggcggtggccataggctgggtgtgcagggaccgatgcctccaacacagctatgcaggtgcctgggctgtgagtccggagacagagctcactggccacgtttgaccggagctcaccgcccagagcgtggacagggcttccatgagacgccaccgtgagaggccaggtggcagcttgagcatggactcccagactgcaggggagcacttggggcagcccccagaaggaccactgctggatcccagggagaacctgctggcgttggctgtgatcctggaatgaggccctttcaaaagcgtcatccacaccaaaggcaaatgtccccaagtgagtgggctccccgctgtcactgccagtcacccacaggaagggactggtgatgggctgtctctacccggagcgtgcgggattcagcaccaggctcttcccagtaccccagacccactgtgggtcttcccgtgggatgcgggatcctgagaccgaagggtgtttggtttaaaaagaagactgggcgtccgctcttccaggacggcctctgtgctgctggggtcacgcgaggctgtttgcaggggacacggtcacaggagctcttctgccctgaacgctcccaacctgcctcccgcccggaagccacaggacccactcatgtgtgtgcccacaagtgtagttagccgtccacaccgaggagcccccggaagtccccactgggcttcagtgtcctctgccacattccctgggaggaacaatgtccctcggctgttccggtgaaaagttgagccacctttggaagacgcacgggtggagtttgccagaagaaaggctgtgccagggccgtgtttggctacaggggctgccggggctcttggctctgcagcgagaaagacacagcccagcagggctggagacgcccatgtccagcaggcgcaggcctggcaacacggtccccagagtcctgagcagcagttaggtgcatggagagggtatcacctggtggccacagtcccccttctcacctcagcaatgatccccaaagtgagaggtggctcccccggcccccaccaccctcagcagccccaccccactcaaccctgagggtccccagggtcctgatgaagacctccgaccccagcgccaggctcctcggagcccaacagtcccaagggggcaggagacggggtggtccagtgctgaggggtacagccctgggccctgaccagccccggcacctgccatgctggttcccggaatgaatcagctgctgactgtctccagaagggctggaaaggatgctgccaggtgacccgaggtgcactcgccccagggagatggagtagacagcctggcctggccctcgggacacattgtctgccccggggctatgggcaaatgcccctccttcttacttcccagaatcccctgacattcccagggtcagccaggacctgttacagccctggtcacttggaactgacagctgtgtgaggcctgcacttctcagacccagacttagaacaaaaggaggagtgaggactcaaggctacaatgaggttccagtacttgttacaagaaattggttttctgcaaaaaaagtccctacctgagcctttaggtgaatgtgggatccactcccgcttttaacatgaaagcattagaagatgtgtggtgtttataaaaaaaaaaaaaaaaaaa

SEQ ID NO: 100 - DNA, 826 bp, Homo sapiens
  misc_feature (4): n equals a,t,g, or c
  misc_feature (5): n equals a,t,g, or c
  misc_feature (15): n equals a,t,g, or c
  misc_feature (810): n equals a,t,g, or c
aaanncaacgccaanttcaatytagtctttrccgscgagamcaacgcggccacgtggagcatcctggctgtcctgtgcctgcttgtggtcgtggcggtggccataggctgggtgtgcagggaccgatgcctccaacacagctatgcaggtgcctgggctgtgagtccggagacagagctcactggccacgtttgaccggagctcaccgcccagagcgtggacagggcttccatgagacgccaccgtgagaggccaggtggcagcttgagcatggactcccagactgcaggggagcacttggggcagcccccagaaggaccactgctggatcccagggagaacctgctggcgttggctgtgatcctggaatgaggccctttcaaaagcgtcatccacaccaaaggcaaatgtccccaagtgagtgggctccccgctgtcactgccagtcacccacaggaagggactggtgatgggctgtctctacccggagcgtgcgggattcagcaccaggctcttcccagtaccccagacccactgtgggtcttcccgtgggatgcgggatcctgagaccgaagggtgtttggtttaaaaagaagactgggcgtccgytcttccaggacggcctctgtgcttgctggggtcacgcgaggctgtttgcaggggacacggtcacaggagctcttctgccctgaacgttccaacctggcttccggccggaagccacaggacccactcatgtgtgtgcccacaagtgtagttagcccgtccacacccgaggaacccccggaagtcccactgggctttaagggnccttctggccacaatt

SEQ ID NO: 101 - DNA, 2114 bp, Homo sapiens
  misc_feature (2003): n equals a,t,g, or c
  misc_feature (2078): n equals a,t,g, or c
  misc_feature (2091): n equals a,t,g, or c
  misc_feature (2095): n equals a,t,g, or c
ggcagagtagagccgatctcccgcgccccgaggttgctcctctccgaggtctcccgcggcccaagttctccgcgccccgaggtctccgcgccccgaggtctccgcggcccgaggtctccgcccgcaccatgcggctgggcagtcctggactgctcttcctgctcttcagcagccttcgagctgatactcaggagaaggaagtcagagcgatggtaggcagcgacgtggagctcagctgcgcttgccctgaaggaagccgttttgatttaaatgatgtttacgtatattggcaaaccagtgagtcgaaaaccgtggtgacctaccacatcccacagaacagctccttggaaaacgtggacagccgctaccggaaccgagccctgatgtcaccggccggcatgctgcggggcgacttctccctgcgcttgttcaacgtcaccccccaggacgagcagaagtttcactgcctggtgttgagccaatccctgggattccaggaggttttgagcrttgaggttacactgcatgtggcagcaaacttcagcgtgcccgtcgtcagcgccccccacagcccctcccaggatgagctcaccttcacgtgtacatccataaacggctaccccaggcccaacgtgtactggatcaataagacggacaacagcctgctggaccaggctctgcagaatgacaccgtcttcttgaacatgcggggcttgtatgacgtggtcagcgtgctgaggatcgcacggacccccagcgtgaacattggctgctgcatagagaacgtgcttctgcagcagaacctgactgtcggcagccagacaggaaatgacatcggagagagagacaagatcacagagaatccagtcagtaccggcgagaaaaacgcggccacgtggagcatcctggctgtcctgtgcctgcttgtggtcgtggcggtggccataggctgggtgtgcagggaccgatgcctccaacacagctatgcaggtgcctgggctgtgagtccggagacagagctcactggccacgtttgaccggagctcaccgcccagagcgtggacagggcttccatgagacgccaccgtgagaggccaggtggcagcttgagcatggactcccagactgcaggggagcacttggggcagcccccagaaggaccactgctggatcccagggagaacctgctggcgttggctgtgatcctggaatgaggccctttcaaaagcgtcatccacaccaaaggcaaatgtccccaagtgagtgggctccccgctgtcactgccagtcacccacaggaagggactggtgatgggctgctctaccggaagcstkcgggattyaagcaccaggstctttccagtaccccagacccactgtgggtctttcccgtgggatgsgggatccttgagaccgaaaggtgtttggtttaaaaagaarcttgggcgtccgctyttycaggacgggcctctgtgctgctggggtcacgcgagacttgtttgcaggggacacggtcacaggagctcttctgccctgaacgctcccaacctgcctcccgcccggaagccacaggacccactcatgtgtgtgcccacaagtgtagttagccgtccacaccgaggagcccccggaagtccccactgggcttcagtgtcctctgccacattccctgggaggaacaatgtccctcggctgttccggtgaaaagttgagccacctttggaagacgcacgggtggagtttgccagaagaaaggctgtgccagggccgtgtttggctacaggggctgccggggctcttggctctgcagcgagaaagacacagcccagcagggctggagacgcccatgtccagcaggcgcaggcctggcaacacggtccccagagtcctgagcagcagttaggtgcatggagagggtatcacctggtggccacagtcccccttctcacctcagcaatgatccccaaagtgagaggtggctcccccggcccccaccaccctcngcagccccaccccactcaaccctgagggtccccagggtcctgatgaagacctccgaccccagcgccaggctcctnggagcgcaacagncccnaagaggcgggaatgtcccg

SEQ ID NO: 102 - DNA, 1579 bp, Homo sapiens
  misc_feature (1485): n equals a,t,g, or c
  misc_feature (1541): n equals a,t,g, or c
  misc_feature (1550): n equals a,t,g, or c
  misc_feature (1559): n equals a,t,g, or c
cttctgttcaataaccgcttggtgcacttggacgagcatgccttccacggcctgcgcgcgctcagccatctctacctgggctgcaacgaactcgcctcgttctccttcgaccacctgcacggtctgagcgccacccacctgcttactctggacctctcctccaaccggctgggacacatctccgtacctgagctggccgcgctgccggccttcctcaagaacggcctctacttgcacaacaaccctttgccttgcgactgccgcctctaccacctgctacagcgctggcaccagsggggcctgagcgccgtgcgcgactttgcgcgcgagtacgtatgcttggccttcaaggtacccgcgtcccgcgtgcgcttcttccagcacagccgcgtctttgagaactgctcgtcggccccagctcttggcctagagcggccggaagagcacctgtacgcgctggtgggtcggtccctgaggctttactgcaacaccagcgtcccggccatgcgcattgcctgggtttcgccgcarcaggagcttctcagggcgccaggatcccgcgatggcagcatcgcggtgctggccgacggcagcttggccataggcaacgtacaggarcagcatgcgggactcttcgtgtgcctggccactgggccccgcctgcaccacaaccagacgcacgagtacaacgtgagcgtgcactttccgsgcccaragcccgaggctttcaacacaggcttcaccacactgctgggctgtgccgtgggccttgtgctcgtgctgctctacctgttcgccccaccctgccgctgctgccgccgtgcctgccgctgccgccgctggccccaaacacccagcccgctccaasagctgagcgcacagtcctcagtactcagcaccacaccgccagacgcacccagccgcaaggccagcgtccacaagcacgtagtctttctggagccaggccggaggggcctcaatggccgcgtgcagctggcagtagctgaggaattcgatctctacaaccctggaggcctgcagctgaaggctggctctgagtccgcagctycataggctccgagggtcccatgacaacctagactgcccagggctcccccacccaggcccccaccctcttgctgctcgccctgctccctgcttcggtccagagaactggcagatactggtgggaagcactgtgcctggccccccagcttcctgtatgggcctcgaaacacaatgggccttctcgctcactggtagagacaggggttgtggtccccaacctgccttctgctctgcccctgcacaggacccaaaggccccaggccctgcaaggtgtgctagttcctgctttcccgcggacttcctagtgcccaaatgccctgtgaggctgagagacccaggcccctgtggctttcaacacagcacagctgtggaagtggctgtgttcttctacagcctgtggaagaacccctgtagcanagcctcccgtccaccctcaggggctgaggcagctctcgaggagtggtgctcaaganctgacgcanggccacctnccctttccaagggggtggga

SEQ ID NO: 103 - DNA, 612 bp, Homo sapiens
cgctctagaactagtggatcccccgggctgcaggaattcggcacgagcaccatccagaaccgagcagatctcgtgataaatgaagtgatgtggtgggaccatggagtgtattactgcaccattgaggctccaggggacacatcaggagaccccgataaggaagtaaagctcatcgtcctacactggctgacagtgatcttcatcatcctgggagccctcctcctcctgctgctgattggagtgtgctggtgccagtgctgtcctcagtattgctgctgctatatccgctgtccctgctgtcctgcccactgctgctgtcctgaggaagccctggcccgccaccgctacatgaagcaggcccaggccctaggtcctcagatgatgggaaaacccctgtactggggggcggacaggagctcccaggyttcatcttatccaatgcacccgctgctgcagcgagatttgtccctgccgtccagcctcccgcagatgccaatgacccagaccaccaatcascctyccatcgccaatggtgtcctggagtatttggagaaagaactgcggaacctcaacctggcccagcctctgccccctgacctcaaaggcagattc

SEQ ID NO: 104 - DNA, 764 bp, Homo sapiens
  misc_feature (659): n equals a,t,g, or c
  misc_feature (690): n equals a,t,g, or c
gcgkccgcgctgctggcgrsmtccggctccggaggtctgtgcggccctcaatgtcactgtgtccccggggcccgtggttgactacctggagggggagaatgccactctcctctgccacgtctcccagaaaaggcggaaggacagcttgctggccgtgcgctggttctttgcacactcctycgactcccaggaggccttgatggtgaagatgaccaagctccgggtggtgcagtactatgggaatttcagccgcagcgccaaacggcggaggctgcgcctgctggaggagcagcggggggcgctctacaggctctccgtcttgacactgcagccctccgatcaagggcattacgtctgcagagtccaggaaatcagcaggcacaggaacaagtggacggcctggtccaatggctcctcagccacggaaatgagagtcatttccctcaaagcttctgaagagtcatcctttgagaaaacaaaagagacttgggcattttttgaagatctctatgtgtatgctgtcctcgtgtgctgcrtggggatcctcasattctgctcttcatgctggtcatcgtctggcagtctgtgtttaacaagcggaaatccagagtgagacattatttggtgaaatgccctcagaacagctcaggggagagctnactagcgtgaccagcttggccccactacaknccaagaagggcaagaggcagaaggagaagcctgacattyctcgcagtccctgscaaarctccgatagcccccac

SEQ ID NO: 105 - DNA, 1273 bp, Homo sapiens
aacttccactttgtaaaggcagaccagtttgctcccagaaaatcaatatctgcttccaatttggaccctttccaataaaccataaactctcatgagtctttgggaacattactgtagggctaagttggtggacaaatatttggtttttaaagttattgcaatgaaagccttaaatagtgaagaaattttcattttgaaaatgcagactggctttagcatgaatgtcaacacagagcatttgtgtagcaatttacagttgctagaactggcaagattcattatcccattttaccctcaagaattctatgggaagttaagtcgtctttacacaaacatggagtctgaggtcattaggggataagaaatttagccaagttcacacagctatatagagggcacaactcataccccagctgtgtttaaaatagataatttatcatatatacatggtccactacatagtcaaacaatttctatagtgggcagtaaatagccacccagactatactcacatcaagaaatgtcctcaataacacagttgacaggatggtgctttcagaatggatcccctgccagtaagtccaagattcctgtgtcccaaaggtccacagagcaacttccccatgcaccctgacccccattcaaacccattagaattcacacacaaggttgcaatgggcaaggcacttggcaagaggagggtcttcagaacacactttccagcttggcgtgtacttcccactctcctaccctgagggcacctggcagcagacaccctcaggggctgaatcagaggtgactgagcttggcacacagtgaagaggcccatgcgctccagtgtgtcttctgatggccaacacctgtgctcctttggaaaagggtgagtaagcacttcttagagagtgtgtttctctatcagtacaggtccaccttgtgaaarggctggaagccctctagaatggtgttcttctytgtctgcggcctcagggtctcataggtgggcaccatggcattcagagacagaccttatacttctctagtcagtctgcccctctggccttaatcttcagggttagtgcatctatttaaaacaagagatgccatctcaggtggtgctggcaatcagcagttgctgtggscctgcaatgccatctgatccttggaaaaccaacatatgtgccatcttacagttgggtccataatggcatttcctctagctatatactgtgagcttgtatcgtggatacaggaagagtagagagtaaaattaatg

SEQ ID NO: 106 - DNA, 796 bp, Homo sapiens
  misc_feature (763): n equals a,t,g, or c
  misc_feature (768): n equals a,t,g, or c
  misc_feature (787): n equals a,t,g, or c
gctcgaaattaaccctactaaagggaacaaaagctggagctccaccgcggtggcggccgctctagaactagtggatcccccgggctgcaggaattcggcacgagctcagccatgggagggagatggttccttctgcatgcttctctatctcctgatggctggtgctgagatgacaaatgcatctctctaggaactctgagcctcaccaccctggagactatgttgtttcttttcattagagctgtttctacatcctgtgctgagagccagctcttccacgcccatagaggggagtcccatgaccctgacctgtgagacccagctctctccacagaggccagatgtccagctgcaattctccctcttcagagatagccagaccctcggattgggctggagcaggtcccccagactccagatccctgccatgtggactgaagactcagggtcttactggtgtgaggtggagacagtgactcacagcatcaaaaaaaggagcctgagatctcagatacgtgtacagagtgagtgtctaaggggctgctcttccagagtcagagctggggagaggaaggccagtgatatctcctgcacccctaggatggtggacataacagagaggartgtccagctattctggtaatcttctctctttaagctcaacgktggtctaacagccctagacattttctttcacttggagtcaggtaatagtaattawtggatcaggtactgattgcccaaccytatgggggtacccganatggncaagaaccggttttttcangaatcaagg

SEQ ID NO: 107 - DNA, 350 bp, Homo sapiens
  misc_feature (162): n equals a,t,g, or c
ccaatttgagtttcatctgctcagctgccagcagcagtgattccccaatgactttgggttggaaaaaagacaatgaactactgcatgatgctgaaatggaaaattatgcacacctccgggcccaaggtggcgaggtgatggagtataccaccatccttcggntgcgygaggtggaatttgccagtgaggggaaatatcagtgtgtcatctccaatcactttggttcatcctactctgtcaaagccaagcttacagtaaatatgcttccctcattcaccaaggacccccatggkatctcaccatccgagctggggscatggcacgcttgggggtgtgctgctkgtggggga

SEQ ID NO: 108 - DNA, 886 bp, Homo sapiens
  misc_feature (720): n equals a,t,g, or c
  misc_feature (806): n equals a,t,g, or c
  misc_feature (859): n equals a,t,g, or c
  misc_feature (870): n equals a,t,g, or c
  misc_feature (885): n equals a,t,g, or c
aattggcacgaggtgctttctctgggcttgacaaactgaggcgactgatactccaaggaaatcggatccgttctattactaaaaaagccttcactggtttggatgcattggagcatctagacctgagtgacaacgcaatcatgtctttacaaggcaatgcattttcacaaatgaagaaactgcaacaattgcatttaaatacatcaagccttttgtgcgattgccagctaaaatggctcccacagtgggtggcggaaaacaactttcagagctttgtaaatgccagttgtgcccatcctcagctgctaaaaggaagaagcatttttgctgttagcccagatggctttgtgtgtgatgattttcccaaaccccagatcacggttcagccagaaacacagtcggcaataaaaggttccaatttgagtttcatctgctcagctgccagcagcagtgattccccaatgactttkgcttggaaaaaagacaatgaactactgcatgatgctgaaatggaaaattatgcacacctccgggcccaaggtggcgaggtgatggagtataccaccatccttcggctgcgcgaggtggaatttgccagtgaggggaaatatcagtgtgtcatctccaatcactttggttcatcctactctgtcaaagccaagcttacagtaaatagtatgtgatctgacttttcctttarcatttaaagataccttttanaaatagaaagcacctgkttttctctyttaatcttaaccctgtcttttcttctcacagttcccacctgactcttcctttcctacctntcattccacaaaattaaaaatccttggttatttgtatctaaacctgcaatttntgtttaaaaanaaaaaccgttactcng

SEQ ID NO: 109 - DNA, 320 bp, Homo sapiens
  misc_feature (284): n equals a,t,g, or c
  misc_feature (303): n equals a,t,g, or c
  misc_feature (316): n equals a,t,g, or c
ccaaaattacaaaaagttatgaaaatttttatactgggaatgatgctcatataagaatacctttttaaactattttttaactttgttttatgcaaaaaagtatcttacgtaaattaatgatataaatcatgattattttatgtatttttataatgccagatttctttttatggaaaatgagttactaaagcattttaaataatacctgccttgtaccattttttaaatagaagttacttcattatattttgcacattatatttaataaaatgtgtcaatttggnggcccaggcccccattttntaccaataaccantttt

SEQ ID NO: 110 - DNA, 665 bp, Homo sapiens
  misc_feature (568): n equals a,t,g, or c
  misc_feature (624): n equals a,t,g, or c
gacctcatccaaaccctctgatttccttaacttggctaagaaaaagaggaagttctccgagtgactcaccactgtggttctactatgccttctgaccccgtcttggacttcaactgggagaatgtggagccatttgaacaggctcctcttctggagcatattttcttctgtcacttgtagaaaagctgtattggattgtgaggcaatgaaaacaaatgaattcccttctccatgtttggactcaaagactaaggtggttatgaagggtcaaaatgtatctatgttttgttcccataagaacaaatcactgcagatcacctattcattgtttcgacgtaagacacacctgggaacccaggatggaaaaggtgaacctgcgatttttaacctaagcatcacagaagcccatgaatcaggcccctacaaatgcaaagcccaagttaccagctgttcaaaatacagtcgtgacttcagcttcacgattgtcgacccggtgacttccccagtgctggaacattatggtcattcaaacagraacagaccgtacatwtaacattacattggcctnctcagtcaatggctcgctgcccattcaattacactttctttggaaaaccatgttgnccatatcaccagctatttccaagtttggacagggtggcctg

SEQ ID NO: 111 - DNA, 421 bp, Homo sapiens
ctgaggctcagccaagcccaggggaacctgtcggttctggagacccggcaggtacagctggagtgtgtggttctcaaccgcaccagcataacctcccagctcatggtggaatggtttgtatggaagcccaaccaccctgagcgggagactgtggcccgcttgagccgtgacgccaccttccactatggagagcaggcagccaagaacaatctgaaggggcggctgcatttggagagtccttcccccggcgtgtaccgtctcttcatccagaacgtggctgtgcaggacagcgggacctacagctgccatgtggaggagtggctgcccagccccagtggcatgtggtataagcgggcagaggacaccgctgggcagacagctctggacattcatgcgaccagatgctttccctgcaggtgga

SEQ ID NO: 112 - DNA, 293 bp, Homo sapiens
  misc_feature (223): n equals a,t,g, or c
  misc_feature (285): n equals a,t,g, or c
tattatttttgcgggaggtgataagtggtcagtggatcctcgagtttcaatttcaacattgaataaaagggactacagcctccagatacagaatgtagatgtgacagatgatggcccatacacgtgttctgttcagactcaacatacacccagaacaatgcaggtgcatctgaactgtgcaagttcctcctaagatatatgacattctgcaaatggatgatgnaccgtgcaatgsaaggkaaccaacgtgcactcttgacttgttttgggccactggggaaaccntagacctt

SEQ ID NO: 113 - DNA, 438 bp, Homo sapiens
  misc_feature (400): n equals a,t,g, or c
  misc_feature (408): n equals a,t,g, or c
  misc_feature (411): n equals a,t,g, or c
aattcggcacaggttggatggacaggaacacagggagaggccggaggggaaacaggggatttgggcaagagaggtaatgggtggaagggaccggacacctgggtcccagagggcatgcaggggaggtggagtctggggaaccgaatgcttgggtcctgggcgggtagctgtttgaaaggccagtacagtacagtacagattagtagtcttgggacctgggaggagggtgtcctgaggtgtgagytttgacctgtctgtcctagcagaagatgtaaaaggtgaccgggaryttygaccarggcctcgagatgagccacggtcccaatgggcgacgagaggaaaagacagagaagccccgtttcagttccatatcgccatggtggctttcacagtttggganattctcgnggnttctgctcctcaagggatctgctcatc

SEQ ID NO: 114 - DNA, 427 bp, Homo sapiens
  misc_feature (140): n equals a,t,g, or c
  misc_feature (143): n equals a,t,g, or c
  misc_feature (399): n equals a,t,g, or c
  misc_feature (427): n equals a,t,g, or c
ctcggcgcgccacgcggcccgccggccacgcgccctgggacaaccacgtctccggccacgccctgttcacagagacaccccatgacatgacagcacggacgggcgaggacgtggagatggcctgctccttccgcggcagnctnccccctcctactcgctggagatccagtggtggtatgtacggagccaccgggactggaccgacaagcaggcgtgggcctcgaaccaggtggtcaaggtggtgggcagcaacatctcccacaagctgcgcctgtcccgggtgaagcccacggacgaaggcacctacgagtgccgcgtcatcgacttcagcgacggcaaggcccggcaccacaaggtcaaggcttactgcgggtgcagccaggggagaatccgtctgcnttgcccgaagcccttccggcgggccgtn

SEQ ID NO: 115 - DNA, 573 bp, Homo sapiens
  misc_feature (449): n equals a,t,g, or c
  misc_feature (484): n equals a,t,g, or c
  misc_feature (557): n equals a,t,g, or c
gggccgcctccccggcacgaataccacttcagggtggtggccaagaatgagctgggggccagcaaaccctcggacaccagccagccctggtgcatcccccggcagcgcgacaggttcacagtgaaggctccgtgctaccgggagcccgacctgagccagaagccccggttcctggtgggcctgcggtcccactgctgccccagggctgcgagtgctgcatgagctgtgccgtgcagggctcgccccggccccacgtcacctggttcaagaatgaccgcagcctggaaggaaaccccgcggtgtacagcactgacctgctgggcgtgtgctccctcaccatccccarcgtatccccgaagracagcggggartacaaggctgtggctgagaacacgctgggccaggcagtcagcactgccaccctcattgtcatagaacccagcacctancctcacctcaccctgggatggtcctggacccttgnaagcttcacttccgacacctgcactggcccgggaagccaatcccaaggatggaagctgtgcccagagccccangaaaatgggagtgaga

SEQ ID NO: 116 - DNA, 666 bp, Homo sapiens
  misc_feature (181): n equals a,t,g, or c
  misc_feature (407): n equals a,t,g, or c
  misc_feature (659): n equals a,t,g, or c
cctgcgcccgacccgagtgtgacacccgtagagactgcctggccaaactgatctatgcccggttgtttgactggctggtatcagtgatcaacagcagcatctgtccagacaccgactcgtgggaccactttcataggcctgctggatgtgtatggatttgaatcatttcctgacaacagtntggaacattgtgcatcaactacgccaatgagaagctgcagcagcattttgtggctcactacctaagggcccagcaggaggaatacgcagttgagggcctggagtggtcattcatcaactaccaggacaaccagccctgtttggatctcattgagggaagccccatcagcatctgctccctcataaatgaggtggggaggaatgccgcctcaatcgacccagcagcngcagcccagctccagacacgcattgagactgccctggaggcagcccctgcctgggccacaataagctcagccgggagcccagcttmattgtggtgcattatgcggggcctgtscggtaccacacagcaggcctggtggagaagaacaaggaccctatcccacctrasctgaccaggctcctgcagcaatcccaggaccccctgctcatggggctgtttcctactaaccccaaagagaagacccaggaggaancccctgg

SEQ ID NO: 117 - DNA, 393 bp, Homo sapiens
  misc_feature (382): n equals a,t,g, or c
  misc_feature (385): n equals a,t,g, or c
gcttctttgggggtgaagagattggggaggaagtctccacccctgggaggcagaagccaggcatagcgcgctggctaggactccagtaccgtgaagggaggcagtgagagcaracatctgtgcctcattcctgatctcaaggggaaagcaagaacaaggatctcgaacctgcggaaggaggaccagtctgtgtacttctgccaagtccagctggacatacagatcagggaggctgtcgtggcagtccatcaaggggacccacctcaccatcacccaggccctcaggcagcccctccacagggcccctctcctgcctggacagctctgctggtctcccccgtcccctggagaagaacaaggccatgggtcggcccctgctgcngcncctgctgc

SEQ ID NO: 118 - DNA, 1168 bp, Homo sapiens
  misc_feature (9): n equals a,t,g, or c
  misc_feature (21): n equals a,t,g, or c
  misc_feature (1168): n equals a,t,g, or c
gggtcctgncagttgggcagnaactccattccggcagattgaggtgggggccttcaacggcctggccagcctcaacaccctggagctgttcgacaactggctgacagtcatccctagcggggcctttgaatacctgtccaagctgcgggagctctggcttcgcaacaaccccatcgaaagcatcccctcttacgccttcaaccgggtgccctccctcatgcgcctggacttgggggagctcaagaagctggagtatatctctgagggagcttttgaggggctggttaacctcaagtatctgaacttgggcatgtgcaacattaaagacatgcccaatctyaccccctggtggrctggcaggagctggagatgtcagggaaccacttccctgagatcaggcctggctccttccatggcctgagctccctcaagaagctctgggtcatgaactcacaggtcagcctgattgagcggaatgcttttgacgggctggcttcacttgtggaactcaacttggcccacaataacctctcwtctttgccccatgacctctttaccccgctgaggtacctggtggagttgcatctacaccacaacccttggaactgtgattgtgacattctgtggctagcctggtggcttcgagagtatatacccaccaattccacctgctgtggccgctgtcatgctcccatgcacatgcgaggccgctacctcgtggaggtggaccaggcctccttccagtgctctgcccccttcatcatggacgcacctcgagacctcaacatttctgagggtcggatggcagaacttaagtgtcggactccccctatgtcctccgtgaagtggttgctgcccaatgggacagtgctcagccacgcctcccgccacccaaggatctctgtcctcaacgacggcaccttgaacttttcccacgtgctgctttcagacactggggtgtacacatgcatggtgaccaatgttgcaggcaactccaacgcctcggcctacctcaatgtgagcacggctgagcttaacacctccaactacagcttcttcaccacagtaacagtggagaccacggagatctcgcctgaggacacaacgcgaaagtacaagcctgttcctaccacgtccactggttaccagccggcatataccacctctn

SEQ ID NO: 119 - DNA, 811 bp, Homo sapiens
  misc_feature (678): n equals a,t,g, or c
  misc_feature (772): n equals a,t,g, or c
  misc_feature (781): n equals a,t,g, or c
  misc_feature (792): n equals a,t,g, or c
aattcccgggtcgacccacgcgtccggcctttgctgctcctctctctgcacggtgttgcagcatccctggaagtgtcagagagccctgggagtatccaggtggcccggggtcagacagcagtcctgccctgcactttcactaccagcgctgccctcattaacctcaatgtcatttggatggtcactcctctctccaatgccaaccaacctgaacaggtcatcctgtatcagggtggacagatgtttgatggtgccccccggttccacggtagggtaggatttacaggcaccatgccagctaccaatgtctctatcttcattaataacactcagttatcagacactggcacctaccagtgcctggtcaacaaccttccagacatagggggcaggaacattggggtcaccggtctcacagtgttagttcccccttctgccccacactgccaaatccaaggatcccaggatattggcagcgatgtcatcctgctctgtagctcagaggaaggcattcctcgaccaacttacctttgggagaagttagacaataccctmaaactacctcaacagstactcaggaccaggtccagggaacagtcaccatccggaacatmagtgccctgtcttcaggtttgtaccaagtgcgtggcttctaatgctattggaaccagcacctgncttctggatctccaggttatttcaccccagcccaggaacattggactaatagctggagccattgcactggtgcagttattatcattttttgcantgcactaantttaagggcantcttttactgggagaagca

SEQ ID NO: 120 - DNA, 474 bp, Homo sapiens
ctgactgtgagtggccccagcaccgtgatgggcgccgtgggggaatccctgagtgttcagtgtcggtatgaagagaaatacaagacgtttaacaaatactggtgcagacaaccatgcttgccaatttggcatgaaatggtggagaccggagggtctgagggagtggtgaggagtgaccaagtgatcatcacggaccatcctggaracctcaccttcaccgtgaccttggaraacctcacggcagacgatgcaggaaaataccgatgtgggattgcaacaatactgcaggaagatggcctgtctggtttcctgcccgatcccttcttccaggttcaagtgctggtctcatcggcctccagtactgagaactctgtgaagacacctgcatctcccaccaggcccagccaatgccaagggtccctgcccagcagcacctgcttcctgcttctcccactcctgaaggtgcctctgctc

SEQ ID NO: 121 - DNA, 580 bp, Homo sapiens
  misc_feature (291): n equals a,t,g, or c
gctcagaacaccaactgctgaggctgccttgggaagaggatgatcctaaacaaagctctgctgctgggggccctcgctctgaccaccgtgatgagcccctgtggaggtgaagacattgtggctgaccacgttgcctcttgtggtgtaaacttgtaccagttttacggtccctctggccagtacacccatgaatttgatggagatgagcagttctacgtggacctggagaggaaggagactgcctggcggtggcctgagttcagcaaatttggaggttttgacccgcagtgncactgagaaacatggctgtggcaaaacacaacttgaacatcatgattaaacgctacaactctaccgctgctaccaatgaggttcctgaggtcacagtgttttccaagtctcccgtgacactgggtcagcccaacaccctcatytgtcttgtggacaacatctttcctcctgtggtcaacatcacatggctgagcaatgggcaskcagtcacagaaggtgtttctgagaccagcttcctctccaagagtgatcatccttcttcaagatcagttacctcaccttcctccct

SEQ ID NO: 122 - protein, 171 aa, Homo sapiens
KSRGPRKGSGSSARSSTTTWEYMKTTWFHKDKRLESGDRIRTGTTLDEIWLHILDPKDSDKGKYTLEIAAGKEVRQLSTDLSGQAFEDAMAEHQRLKTLAIIEKNRAKVVRGLPDVATIMEDKTLCLTCIVSGDPTPEISWLKNDQPVTFLDRYRMEVRGTEVTITIEKVN

SEQ ID NO: 123 - protein, 94 aa, Homo sapiens
  misc_feature (63): Xaa equals any of the naturally occurring L-amino acids
TGFYFCEVQNVHGSERSGPVSVVVNRKRPGWGGTGHIRAGPDGGAPRKGWGPGHGNFKATYLXVALSSCPSSAHLGNALTSLVPSYFIFGSLNL

SEQ ID NO: 124 - protein, 586 aa, Homo sapiens
LRRSSCECAGVARGYRAGGAAGEPDLPCVDHSPGPAHLHMVPGWAAAPGCPLHPPAQRHSQGCHLLPLRCGPPWSGTPPLQTYHLGRPLRAPQPAPDLPPGEPWRQLALVLCTVDSRPPAQLALSHAGRLLASSTAASVPNTLRLELRGPQPRDEGFYSCSARSPLGQANTSLELRLEGVRVILAPEAAVPEGAPITVTCADPAAHAPTLYTWYHNGRWLQEGPAASLSFLVATRAHAGAYSCQAQDAQGTRSSRPAALQVLYAPQDAVLSSFRDSRARSMAVIQCTVDSEPPAELALSHDGKVLATSSGVHSLASGTGHVQVARNALRLQVQDVPAGDDTYVCTAQNLLGSISTIGRLQVEGARVVAEPGLDVPEGAALNLSCRLLGGPGPVGNSTFAWFWNDRRLHAEPVPTLAFTHVARAQAGMYHCLAELPTGAAASAPVMLRVLYPPKTPTMMVFVEPEGGLRGILDCRVDSEPLASLTLHLGSRLVASSQPQGAPAEPHIHVLASPNALRVDIEALRPSDQGEYICSASNVLGSALPPPTLGSEPCTACISSSSCSGSWDCWWASCSCCWAWGPATPGAH

SEQ ID NO: 125 - protein, 72 aa, Homo sapiens
  misc_feature (3): Xaa equals any of the naturally occurring L-amino acids
  misc_feature (9): Xaa equals any of the naturally occurring L-amino acids
  misc_feature (14): Xaa equals any of the naturally occurring L-amino acids
  misc_feature (42): Xaa equals any of the naturally occurring L-amino acids
NGXKGKPNXIPAWXTNPYPRTKMGGGAPTLWCVIGNMGKMPXPVFWKRRNSARPYLFPIFRNFSSKKFQLYL

SEQ ID NO: 126 - protein, 255 aa, Homo sapiens
  misc_feature (101): Xaa equals any of the naturally occurring L-amino acids
LPFNFVDPNMDSREGEDKELKIDLEVFEMPPRFIMPICDFKIPENSDAVFKCSVIGIPTPEVKWYKEYMCIEPDNIKYVISEEKGSHTLKIRNVCLSDSAXYRCRAVNCVGEAICRGFLTMGDSEIFAVIAKKSKVTLSSLMEELVLKSNYTDSFFEFQVVEGPPRFIKGISDCYAPIGTAAYFQCLVRGSPRPTVYWYKDGKLVQGRRFTVEESGTGFHNLFITSLVKSDEGEYRCVATNKSGMAESFAALTLT

SEQ ID NO: 127 - protein, 78 aa, Homo sapiens
QNSPGQRGSISCSIRNPAIPHGWFLSGSGDTLQPPADIQNLRPRDCCCGTVCLTPASSPLLSARRMGVTAQTFPLDRL

SEQ ID NO: 128 - protein, 315 aa, Homo sapiens
LWTISNPVTLTCDATGIPPPTIAWLKNHKRIENSDSLEVRILSGGSKLQIARSQHSDSGNYTCIASNMEGKAQKYYFLSIQVPPSVAGAEIPSDVSVLLGENVELVCNANGIPTPLIQWLKDGKPIASGETERIRVSANGSTLNIYGALTSDTGKYTCVATNPAGEEDRIFNLNVYVTPTIRGNKDEAEKLMTLVDTSINIECRATGTPPPQINWLKNGLPLPLSSHIRLLAAGQVIRIVRAQVSDVAVYTCVASNRAGVDNKHYNLQVFAPRKKKKKKKKKKKKKKKKKKKKGGRSRGSLEGPQVTRACDVIAL

SEQ ID NO: 129 - protein, 87 aa, Homo sapiens
MKKMMKKAMRMYHVYYWPQTTSPLPRVAHRKQPAPFFFLFSPTTHHPSLQTLPPTRLGCRVCEAEQKVCKSPLCLICVFPRKRAGSL

SEQ ID NO: 130 - protein, 461 aa, Homo sapiens
HEGTQASMVCGVTHDPRVNIRYIWEKDGATLGTESHPRIRLDRNGSLHISQTWSGDIGTYTCRVISAGGNDSRSAHLRVRQLPHAPEHPVATLSTVERRAINLTWTKPFDGNSPLIRYILEMSENNAPWTVLLASVDPKATSVTVKGLVPARSYQFRLCAVNDVGKGQFSKDTERVSLPEEPPTAPPQNVIASGRTNQSIMIQWQPPPESHQNGILKGYIIRYCLAGLPVGYQFKNITDADVNNLLLEDLIIWTNYEIEVAAYNSAGLGVYSSKVTEWTLQGVPTVPPGNVHAEATNSTTIRFTWNAPSPQFINGINQGYKLIAWEPEQEEEVTMVTARPNFQDSIHVGFVSGLKKFTEYFTSVLCFTTPGDGPRSTPQLVRTHEDGRHPPALLFLPPPAQGQAGRPRQKGGPGLSPRLRYPQITTGYLTDGGLSLALTGLGGWGFLLGCSAWARGTPELQ

SEQ ID NO: 131 - protein, 550 aa, Homo sapiens
  misc_feature (25): Xaa equals any of the naturally occurring L-amino acids
  misc_feature (26): Xaa equals any of the naturally occurring L-amino acids
  misc_feature (367): Xaa equals any of the naturally occurring L-amino acids
  misc_feature (515): Xaa equals any of the naturally occurring L-amino acids
  misc_feature (520): Xaa equals any of the naturally occurring L-amino acids
HYRRYACRYRSGIPGSTHASAHASXXASAHASGLALGMGQGLKAWPRYRVVGSADAGQYNLEITDAELSDDASYECQATEAALRSRRAKLTVLIPPEDTRIDGGPVILLQAGTPHNLTCRAFNAKPAATIIWFRDGTQQEGAVASTELLKDGKRETTVSQLLINPTDLDIGRVFTCRSMNEAIPSGKETSIELDVHHPPTVTLSIEPQTVQEGERVVFTCQATANPEILGYRWAKGGFLIEDAHESRYETNVDYSFFTEPVSCEVHNKVGSTNVSTLVNVHFAPRIVVDPKPTTTDIGSDVTLTCVWVGNPPLTLTWTKKDSNMGPRPPGSPPEAALSAQVLSNSNQLLLKSVTQADAGTYTCRAIXPRIGVAEREVPLYVNGPPIISSEAVQYAVRGDGGKVECFIGSTPPPDRIAWAWKENFLEVGTLERYTVERTNSGSGVLSTLTINNVMEADFQTHYNCTAWNSFGPGTAIIQLEEREVLPVGIIAGATIGASILLIFFFIALVFFLYRXRKGSXKDVTLRKLDIKVETVNREPLTMHSDREDDT

SEQ ID NO: 132 - protein, 277 aa, Homo sapiens
MIFPEMSPLSLCGISKALKFSLSKATFPKSPQAVVDVSSHLQKMCIHNDGTKLVMLNNLKKMTNLTELELVHCDLERIPHAVFSLLSLQELDLKENNLKSIEEIVSFQHLRKLTVLKLWHNSITYIPEHIKKLTSLERLSFSHNKIEVLPSHLFLCNKIRYLDLSYNDIRFIPPEIGVLQSLQYFSITCNKVESLPDELYFCKKLKTLKIGKNSLSVLSPKIGNLLFLSYLDVKGNHFEILPPELGDCRALKRAGLVVEDALFETLPSDVREQMKTE

SEQ ID NO: 133 - protein, 164 aa, Homo sapiens
  misc_feature (157): Xaa equals any of the naturally occurring L-amino acids
NTTHYRESWYACRYRSGIPGSTHASASTFLIIDPLLGLLKIQETQDLDAGDYTCVAINEAGRATGKITLDVGSPPVFIQEPADVSMEIGSNVTLPCYVQGYPEPTIKWRRLDNMPIFSRPFSVSSISQLRTGALFILSRLKEIYFVRICTFMLYIYXLYIGIAI

SEQ ID NO: 134 - protein, 261 aa, Homo sapiens
  misc_feature (180): Xaa equals any of the naturally occurring L-amino acids
  misc_feature (215): Xaa equals any of the naturally occurring L-amino acids
ERDKEPLQERFFRPHFLQAPGDMVAHEGRLCRLDCKVSGLPPPELTWLLNGQPVLPDASHKMLVRETGVHSLLIDPLTQRDAGTYKCIATNKTGQNSFSLELSVVAKEVKKAPVILEKLQNCGVPEGHPVRLECRVIGMPPPVFYWKKDNETIPCTRERISMHQDTTGYACLLIQPAKKXDAGWYTLSAKNEAGIVSCTARLDIYAQWHHQIPPXMSVRPSGSRYGSLTSKGLDIFSAFSSMESTMVYSCSSRSVVESDEL

SEQ ID NO: 135 - protein, 261 aa, Homo sapiens
  misc_feature (123): Xaa equals any of the naturally occurring L-amino acids
  misc_feature (125): Xaa equals any of the naturally occurring L-amino acids
  misc_feature (130): Xaa equals any of the naturally occurring L-amino acids
  misc_feature (136): Xaa equals any of the naturally occurring L-amino acids
  misc_feature (171): Xaa equals any of the naturally occurring L-amino acids
QPQHHGTSLTCQVTLPGAGVTTNRTIQLNVSYPPQNLTVTVFQGEGTASTALGNSSSLSVLEGQSLRLVCAVDSNPPARLSWTWRSLTLYPSQPSNPLVLELQVHLGDEGEFTCRAQNSLGSXHXSLNLXLQQEYXGKMRPVSGVLLGAVGGAGATALVFLSFCVIFIVVXSCRKKSARPAADVGDIGMKDANTIRGSASQGNLTESWADDNPRHHGLAAHSSGEEREIQYAPLSFHKGEPQDLSGQEATNNEYSEIKIPK

SEQ ID NO: 136 - protein, 321 aa, Homo sapiens
TTSSRSFKHSRSAAVTSEFHLVPSRSMNGQPLTCVVSHPGLLQDQRITHILHVSFLAEASVRGLEDQNLWHIGREGAMLKCLSEGQPPPSYNWTRLDGPLPSGVRVDGDTLGFPPLTTEHSGIYVCHVSNEFSSRDSQVTVDVLDPQEDSGKQVDLVSASVVVVGVIAALLFCLLVVVVVLMSRYHRRKAQQMTQKYEEELTLTRENSIRRLHSHHTDPRSQPEESVGLRAEGHPDSLKDNSSCSVMSEEPEGRSYSTLTTVREIETQTELLSPGSGRAEEEEDQDEGIKQAMNHFVQENGTLRAKPTGNGIYINGRGHLV

SEQ ID NO: 137 - protein, 181 aa, Homo sapiens
  misc_feature (175): Xaa equals any of the naturally occurring L-amino acids
  misc_feature (177): Xaa equals any of the naturally occurring L-amino acids
ADAREAGFQVKAYTFSEPFHLIVSYELFPAPILRAVPSAEPQAGSPMTLSCQTKLPLQRSAARLLFSFYKDGRIVQSRGLSSEFQIPTASEDHSGSYWCEAATEDNQVWKQSPQLEIRVQGASSSAAPPTLNPAPQKSAAPGTAPEEAPGPLLRATPSSEDPGFSSPLGMPDLIXIXRWAF

SEQ ID NO: 138 - protein, 143 aa, Homo sapiens
  misc_feature (14): Xaa equals any of the naturally occurring L-amino acids
  misc_feature (45): Xaa equals any of the naturally occurring L-amino acids
VYSIPPDRPKLSAXLDMGQGHMALFICTVDSRPLALLALFHGEHXLATSLGPQVPSHGRFQAKAEANSLKLEVRELGLGDSGSYRCEATNVLGSSNTSLFFQVRGECQSSEDMVDSDALGTTLVRLWAGCCEFCAEICLFQSW

SEQ ID NO: 139 - protein, 183 aa, Homo sapiens
PTRPVIEGNLISLLCESSGIPPPNLIWKKKGSPVLTDSMGRVRILSGGRQLQISIAEKSDAALYSCVASNVAGTAKKEYNLQVYIRPTITNSGSHPTEIIVTRGKSISLECEVQGIPPPTVTWMKDGVMHPRTTFLMVDEEQTVPFALRDENLKGVVYTTRPLREAETYRMRVRASSTVQWDH

SEQ ID NO: 140 - protein, 253 aa, Homo sapiens
MTQGTEDLKGPGQRCENEPLLDPVGPEPLGPESQSGKGDMVEMATRFGSTLQLDLEKGKESLLEKRLVAEEEEDEEEVEEDGPSSCSEDDYSELLQEITDNLTKKEIQIEKIHLDTSSFVEELPGEKDLAHVVEIYDFEPALKTEDLLATFSEFQEKGFRIQWVDDTHALGIFPCLASAAEALTREFSVLKIRPLTQGTKQSKLKALQRPKLLRLVKERPQTNATVARRLVARALGLQHKKKERPAVRGPLPP

SEQ ID NO: 141 - protein, 301 aa, Homo sapiens
HASEIASCVCSQESFGGCCVSGLIAMGTKAQVERKLLCLFILAILLSVKLSCAYSGFSSPRVEWKFDQGDTTRLVCYNNKITASYEDRVTFLPTGITFKSVTREDTGTYTCMVSEEGGNSYGEVKVKLIVLVPPSKPTVNIPSSATIGNRAVLTCSEQDGSPPSEYTWFKDGIVMPTNPKSTRAFSNSSYVLNPTTGELVFDPLSASDTGEYSCEARNGYGTPMTSNAVRMEAVERNVGVIVAAVLVTLILLGILVFGIWFAYSRGHFDRTKKGTSSKKVIYSQPSARSEGEFKQTSSFLV

SEQ ID NO: 142 - protein, 208 aa, Homo sapiens
  misc_feature (139): Xaa equals any of the naturally occurring L-amino acids
REQKLELHRGGGRSRTSGSPGLQEFPFKSTSDVTDKLTIDWTYRPPSSSHTVSIFHYQSFQYPTTAGTFRDRISWVGNVYKGDASISISNPTIKDNGTFSCAVKNPPDVHHNIPMTELTVTERGFGTMLSSVALLSILXFVPSAVVVALLLVRMGRKAAGLKKRSRSGYKKSSIEVSDDTDQEEEEACMARLCVRCAECLDSDYEETY

SEQ ID NO: 143 - protein, 124 aa, Homo sapiens
GSTHASGSPPLPTPALRWTKDFVPLGNGPTLSLSSLTFDSAGTYVCEASMPTVPLLSRTQSFKLLVQGPPQLSAEETQPQTEGGWREGDEVRLVCSARGYPEPKLSWSQLGGSPAEPASLGRAG

SEQ ID NO: 144 - protein, 261 aa, Homo sapiens
PPIMPGWLTLPTLCRFLLWAFTIFHKAQGDPASHPGPHYLLPPIHEVIHSHRGATATLPCVLGTTPPSYKVRWSKVEPGELRETLILITNGLHARGYGPLGGRARMRRGHRLDASLVIAGVRLEDEGRYRCELINGIEDESVALTLSLEGVVFPYQPSRGRYQFNYYEAKQACEEQDGRLATYSQLYQAWTEGLDWCNAGWLLEGSVRYPVLTARAPCGGRGRPGIRSYGPRDRMRDRYDAFCFTSALAAKCSSCPAADAV

SEQ ID NO: 145 - protein, 66 aa, Homo sapiens
MMWYKNSSLLDLEKSRHQIQQTSESFQLSITKVEKPDNGTYSCIAKSSLKTESLDFHLIVKALHEG

SEQ ID NO: 146 - protein, 214 aa, Homo sapiens
  misc_feature (197): Xaa equals any of the naturally occurring L-amino acids
  misc_feature (204): Xaa equals any of the naturally occurring L-amino acids
  misc_feature (211): Xaa equals any of the naturally occurring L-amino acids
  misc_feature (212): Xaa equals any of the naturally occurring L-amino acids
PNTRIQRFEVLKNGTLVIRKVQVQDRGQYMCTASNLHGLDRMVVLLSVTVQQPQILASHYQDVTVYLGDTIAMECLAKGTPAPQISWIFPDRRVWQTVSPVEGRITLHENRTLSIKEASFSDRGVYKCVASNAAGADSLAIRLHVAALPPLSTRRSWRTSRCPRGSAFTFTALPRLRPCPACRWVLGDGTPDPPLAXSSPGNLXWFSPTGXXYI

SEQ ID NO: 147 - protein, 263 aa, Homo sapiens
  misc_feature (232): Xaa equals any of the naturally occurring L-amino acids
  misc_feature (236): Xaa equals any of the naturally occurring L-amino acids
  misc_feature (244): Xaa equals any of the naturally occurring L-amino acids
  misc_feature (252): Xaa equals any of the naturally occurring L-amino acids
  misc_feature (255): Xaa equals any of the naturally occurring L-amino acids
  misc_feature (260): Xaa equals any of the naturally occurring L-amino acids
  misc_feature (263): Xaa equals any of the naturally occurring L-amino acids
IASSKLTLTKGNKSWSSTAVAAALELVDPPGCRNSARAARARAEFGTSGDAVTLKCNFKTDGRMREIVWYRVTDGGTIKQKIFTFDAMFSTNYSHMENYRKREDLVYQSTVRLPEVRISDNGPYECHVGIYDRATREKVVLASGNIFLNVMAPPTSIEVVAADTPAPFSRYQAQNFTLVCIVSGGKPAPMPTTENIPETVVSREFPRWVHSAEPTYFLRHKPTPSSDGTVEXRALXTGTLTHRXTTRPFNLXVKXPIFQXPSX

SEQ ID NO: 148 - protein, 144 aa, Homo sapiens
GPAINMFCFLICDCRGEAAHKWSLPEMVSKESERLSITKSACGRNGKQFCSTLTLNTAQANHTGFYSCKYLAVPTSKKKETESAIYIFISGKTSIFYILFAFALQMSHKSTLIHWKGCFPSEYERNGLGKRFHPSCRHFRGCQF

SEQ ID NO: 149 - protein, 361 aa, Homo sapiens
  misc_feature (99): Xaa equals any of the naturally occurring L-amino acids
  misc_feature (108): Xaa equals any of the naturally occurring L-amino acids
  misc_feature (199): Xaa equals any of the naturally occurring L-amino acids
  misc_feature (238): Xaa equals any of the naturally occurring L-amino acids
  misc_feature (239): Xaa equals any of the naturally occurring L-amino acids
  misc_feature (241): Xaa equals any of the naturally occurring L-amino acids
  misc_feature (243): Xaa equals any of the naturally occurring L-amino acids
LEEGDYTCYAQNTLGKDEMKVHLTVITAAPRIRQSNKTNKRIKAGDTAVLDCEVTGDPKPKIFWLLPSNDMISFSIDRYTFHANGSLTINKVKLLDSGXYVCVARNPXGDDTKMYKLDVVSKPPLINGLYTNRTVIKATAVRHSKKHFDCRAEGTPSPEVMWIMPDNIFLTAPYYGSRITVHKNGTLEIRNVRLSDSAXFICVARNEGGESVLVVQLEVLEMLRRPTFRNPFNEKIVXXLXKXTALNCSVDGNPPPEIIWILPNGTRFSNGPQSYQYLIASNGSFIISKTTREDAGKYRCAARNKVGYIEKLVILEIGQKPVILTYAPGTVKGISGESLSLHCVSDGIPKPNIKWTMPSGL

SEQ ID NO: 150 - protein, 370 aa, Homo sapiens
REQKLELHRGGGRSRTSGSPGLQEFGTSRADLPRPEVAPLRGLPRPKFSAPRGLRAPRSPRPEVSARTMRLGSPGLLFLLFSSLRADTQEKEVRAMVGSDVELSCACPEGSRFDLNDVYVYWQTSESKTVVTYHIPQNSSLENVDSRYRNRALMSPAGMLRGDFSLRLFNVTPQDEQKFHCLVLSQSLGFQEVLSIEVTLHVAANFSVPVVSAPHSPSQDELTFTCTSINGYPRPNVYWINKTDNSLLDQALQNDTVFLNMRGLYDVVSVLRIARTPSVNIGCCIENVLLQQNLTVGSQTGNDIGERDKITENPVSTGEKNAATWSILAVLCLLVVVAVAIGWVCRDRCLQHSYAGAWAVSPETELTGHV

SEQ ID NO: 151 - protein, 163 aa, Homo sapiens
  misc_feature (69): Xaa equals any of the naturally occurring L-amino acids
ADIHFLEPLESGRPTRLSCSLPGSCEAGPPLTFSWTGNALSPLDPETTRSSELTLTPRPEDHGTNLTCXVKRQGAQVTTERTVQLNVSYAPQNLAISIFFRNGTGTALRILSNGMSVPIQEGQSLFLACTVDSNPPASLSWFREGKALNPSQTSMSGTLELLT

SEQ ID NO: 152 - protein, 105 aa, Homo sapiens
  misc_feature (86): Xaa equals any of the naturally occurring L-amino acids
STHASAHASGTEARAKRKQLLLFTSVILGSLALSRGAVHSSEPKVSVAENSPAKLLCSYSGFSSPRVEWKFAQGDITSLVCYNNKXTASYEDRVTFSHSGIISIL

SEQ ID NO: 153 - protein, 366 aa, Homo sapiens
  misc_feature (357): Xaa equals any of the naturally occurring L-amino acids
LLFNNRLVHLDEHAFHGLRALSHLYLGCNELASFSFDHLHGLSATHLLTLDLSSNRLGHISVPELAALPAFLKNGLYLHNNPLPCDCRLYHLLQRWHQRGLSAVRDFAREYVCLAFKVPASRVRFFQHSRVFENCSSAPALGLERPEEHLYALVGRSLRLYCNTSVPAMRIAWVSPQQELLRAPGSRDGSIAVLADGSLAIGNVQEQHAGLFVCLATGPRLHHNQTHEYNVSVHFPRPEPEAFNTGFTTLLGCAVGLVLVLLYLFAPPCRCCRRACRCRRWPQTPSPLQELSAQSSVLSTTPPDAPSRKASVHKHVVFLEPGRRGLNGRVQLAVAEEFDLYNPGGLQLKAGSESASXIGSEGPMTT

SEQ ID NO: 154 - protein, 193 aa, Homo sapiens
  misc_feature (8): Xaa equals any of the naturally occurring L-amino acids
  misc_feature (37): Xaa equals any of the naturally occurring L-amino acids
  misc_feature (47): Xaa equals any of the naturally occurring L-amino acids
  misc_feature (155): Xaa equals any of the naturally occurring L-amino acids
  misc_feature (163): Xaa equals any of the naturally occurring L-amino acids
  misc_feature (173): Xaa equals any of the naturally occurring L-amino acids
  misc_feature (180): Xaa equals any of the naturally occurring L-amino acids
  misc_feature (187): Xaa equals any of the naturally occurring L-amino acids
QSWTSPFXFSRPTSMHCPGRGPQDLRLDAFAGPCYSXTSRLHPQGPXSCHIHMNTWNVNRAGCESLAVKVFAYPMASIEWRKDGLDIQLPGDDPHISVQFRGGPQRFEVTGWLQIQAVRPSDEGTYRCLARNALGQVEAPASLTVLTPDQLNSTXIPQLRSLXLVPEEEAESXENDDYYXVQNSGPXGLGNRL

SEQ ID NO: 155 - protein, 428 aa, Homo sapiens
  misc_feature (1): Xaa equals any of the naturally occurring L-amino acids
XGTSTIQNRADLVINEVMWWDHGVYYCTIEAPGDTSGDPDKEVKLIVLHWLTVIFIILGALLLLLLIGVCWCQCCPQYCCCYIRCPCCPAHCCCPEEALARHRYMKQAQALGPQMMGKPLYWGADRSSQVSSYPMHPLLQRDLSLPSSLPQMPMTQTTNQPPIANGVLEYLEKELRNLNLAQPLPPDLKGRFGHPCSMLSSLGSEVVERRIIHLPPLIRDLSSSRRTSDSLHQQWLTPIPSRPWDLREGRSHHHYPDFHQELQDRGPKSWALERRELDPSWSGRHRSSRLNGSPIHWSDRDSLSDVPSSSEARWRPSHPPFRSRCQERPRRPSPRESTQRHGRRRRHRSYSPPLPSGLSSWSSEEDKERQPQSWRAHRRGSHSPHWPEEKPPSYRSLDITPGKNSRKKGSVERRSEKDSSHSGRSVVI

SEQ ID NO: 156 - protein, 196 aa, Homo sapiens
  misc_feature (134): Xaa equals any of the naturally occurring L-amino acids
  misc_feature (153): Xaa equals any of the naturally occurring L-amino acids
  misc_feature (163): Xaa equals any of the naturally occurring L-amino acids
  misc_feature (185): Xaa equals any of the naturally occurring L-amino acids
  misc_feature (191): Xaa equals any of the naturally occurring L-amino acids
  misc_feature (195): Xaa equals any of the naturally occurring L-amino acids
TVCCLIEDSVGKPSLYCLTEQAKKMDRLKSHLTVCFLPSVPFLILVSTLATAKSVTNSTLNGTNVVLGSVPVIIARTDHIIVKEGNSALINCSVYGIPDPQFKWYNSIGKLLKEEEDEKERGGGKWQMHDSGLXNITKVSFSDRGKYTCVASXIYGTVNNTVXLRVIFTSGDMGCLLHWSCAWGXSHPSWXSISXR

SEQ ID NO: 157 - protein, 194 aa, Homo sapiens
NAPHLPVRNSRVDPRVRRKDSLLAVRWFFAHSFDSQEALMVKMTKLRVVQYYGNFSRSAKRRRLRLLEEQRGALYRLSVLTLQPSDQGHYVCRVQEISRHRNKWTAWSNGSSATEMRVISLKASEESSFEKTKETWAFFEDLYVYAVLVCCMGILSILLFMLVIVWQSVFNKRKSRVRHYLVKCPQNSSGESCH

SEQ ID NO: 158 - protein, 147 aa, Homo sapiens
ASPPWRLCCFFSLELFLHPVLRASSSTPIEGSPMTLTCETQLSPQRPDVQLQFSLFRDSQTLGLGWSRSPRLQIPAMWTEDSGSYWCEVETVTHSIKKRSLRSQIRVQSECLRGCSSRVRAGERKASDISCTPRMVDITERSVQLFW

SEQ ID NO: 159 - protein, 117 aa, Homo sapiens
  misc_feature (5): Xaa equals any of the naturally occurring L-amino acids
  misc_feature (35): Xaa equals any of the naturally occurring L-amino acids
  misc_feature (99): Xaa equals any of the naturally occurring L-amino acids
  misc_feature (108): Xaa equals any of the naturally occurring L-amino acids
RKLIXCKAEGIPTPRVLWAFPEGVVLPAPYYGNRXTVHGNGSLDIRSLRKSDSVQLVCMARNEGGEARLILQLTVLEPMEKPIFHDPISEKITAMAGHXISLNCSAAXTPTTRLVWG

SEQ ID NO: 160 - protein, 520 aa, Homo sapiens
ICFPHSPRTPMDLTIRAGAMARLECAAVGHPAPQIAWQKDGGTDFPAARERRMHVMPEDDVFFIVDVKIEDIGVYSCTAQNSAGSISANATLTVLETPSFLRPLLDRTVTKGETAVLQCIAGGSPPPKLNWTKDDSPLVVTERHFFAAGNQLLIIVDSDVSDAGKYTCEMSNTLGTERGNVRLSVIPTPTCDSPQMTAPSLDDDGWATVGVVIIAVVCCVVGTSLVWVVIIYHTRRRNEDCSITNTDETNLPADIPSYLSSQGTLADRQDGYVSSESGSHHQFVTSSGAGFFLPQHDSSGTCHIDNSSEADVEAATDLFLCPFLGSTGPMYLKGNVYGSDPFETYHTGCSPDPRTVLMDHYEPSYIKKKECYPCSHPSEESCERSFSNISWPSHVRKLLNTSYSHNEGPGMKNLCLNKSSLDFSANPEPASVASSNSFMGTFGKALRRPHLDAYSSFGQPSDCQPRAFYLKAHSSPDLDSGSEEDGKERTDFQEENHICTFKQTLENYRTPNFQSYDLDT

SEQ ID NO: 161 - protein, 268 aa, Homo sapiens
  misc_feature (3): Xaa equals any of the naturally occurring L-amino acids
QRXQGHNVTLMVQLEEGDVQRTLIQVDFGDGIAVSYVNLSSMEDGIKHVYQNVGIFRVTVQVDNSLGSDSAVLYLHVTCPLEHVHLSLPFVTTKNKEVNATAVLWPSQVGTLTYVWWYGNNTEPLITLEGSISFRFTSEGMNTITVQVSAGNAILQDTKTIAVYEEFRSLRLSFSPNLDDYNPDIPEWRRDIGRVIKKSLVEATGVPGQHILVAVLPGLPTTAELFVLPYQDPAGENKRSTDDLEHISELLIHTLNQNSVHFELKPGV

SEQ ID NO: 162 - protein, 96 aa, Homo sapiens
  misc_feature (20): Xaa equals any of the naturally occurring L-amino acids
  misc_feature (55): Xaa equals any of the naturally occurring L-amino acids
  misc_feature (56): Xaa equals any of the naturally occurring L-amino acids
  misc_feature (74): Xaa equals any of the naturally occurring L-amino acids
  misc_feature (90): Xaa equals any of the naturally occurring L-amino acids
LHLGPRPLLWLGPWHPCLRXATTIANRSQGSRTALIQDIERGNRGCESSRDTGPXXPLKTRSVLRGDDVLLPCXQPSNLARALWLLNGSXGLSDGQ

SEQ ID NO: 163 - protein, 362 aa, Homo sapiens
LTTVVLLCLLTPSWTSTGRMWSHLNRLLFWSIFSSVTCRKAVLDCEAMKTNEFPSPCLDSKTKVVMKGQNVSMFCSHKNKSLQITYSLFRRKTHLGTQDGKGEPAIFNLSITEAHESGPYKCKAQVTSCSKYSRDFSFTIVDPVTSPVLNIMVIQTETDRHITLHCLSVNGSLPINYTFFENHVAISPAISKYDREPAEFNLTKKNPGEEEEYRCEAKNRLPNYATYSHPVTMPSTGGDSCPFCLKLLLPGLLLLLVVIILILAFWVLPKYKTRKAMRNNVPRDRGDTAMEVGIYANILEKQAKEESVPEVGSRPCVSTAQDEAKHSQELQYATPVFQEVAPREQEACDSYKSGYVYSELNF

SEQ ID NO: 164 - protein, 67 aa, Homo sapiens
  misc_feature (19): Xaa equals any of the naturally occurring L-amino acids
  misc_feature (36): Xaa equals any of the naturally occurring L-amino acids
VDLTYRVRIVKELHSYSKXSAKCQIAAYYSSRAPHXYVLFPSQESSSLTLYCSQDMFGLGPGEGHRK

SEQ ID NO: 165 - protein, 97 aa, Homo sapiens
RFCRYGPESRVDHASAHASAHASAHASAANKPLVSHFRYFSSFLQREGWLSYLPKPLPGLNSTSTIYCSVLSLFHVTIAWSIREKPRLLVDSQLKYH

SEQ ID NO: 166 - protein, 341 aa, Homo sapiens
  misc_feature (178): Xaa equals any of the naturally occurring L-amino acids
LRLSQAQGNLSVLETRQVQLECVVLNRTSITSQLMVEWFVWKPNHPERETVARLSRDATFHYGEQAAKNNLKGRLHLESPSPGVYRLFIQNVAVQDSGTYSCHVEEWLPSPSGMWYKRAEDTAGQTALTVMRPDASLQVDTVVPNATVSEKAAFQLDCSIVSRSSQDSRFAVAWYSLXTKAGGKGAALAWKTGRGKGGGGGGGRRRRRRPNRADGPAERGPRCCLWPRGQSLGGQASLPEALPGALPAHSAAGKPPRYRQLLLPCGGVAAQPSEGMVPADGGGVSPHRHPCSRYKSHPPVHHLLQRRTLLLRLLLPFPHLWHSYHHHPSGAFQEPELQQEL

SEQ ID NO: 167 - protein, 201 aa, Homo sapiens
  misc_feature (182): Xaa equals any of the naturally occurring L-amino acids
CELKYGGFVVRRTTELTVTAPLTDKPPKLLYPMESKLTIQETQLGDSANLTCRAFFGYSGDVSPLIYWMKGEKFIEDLDENRVWESDIRILKEHLGEQEVSISLIVDSVEEGDLGNYSCYVENGNGRRHASVLLHKRELMYTVELAGGLGAILLLLVCLVTIYKCYKIEIMLFYRNHFGAEXLDGDNKDYDAYLSYTKSGS

SEQ ID NO: 168 - protein, 152 aa, Homo sapiens
  misc_feature (38): Xaa equals any of the naturally occurring L-amino acids
  misc_feature (52): Xaa equals any of the naturally occurring L-amino acids
MQCGKDVSFPDVRKVKVVVNFAPTIQEIKSGTVTPGRXGLIRCEGAGVPPPXFEWYKGEKKLFNGQQGIIIQNFSTRSILTVTNVTQEHFGNYTCVAANKLGTTNASLPLNPPSTAQYGITGSADVLFSCWYLVLTLSSFTSIFYLKNAILQ

SEQ ID NO: 169 - protein, 299 aa, Homo sapiens
  misc_feature (1): Xaa equals any of the naturally occurring L-amino acids
  misc_feature (24): Xaa equals any of the naturally occurring L-amino acids
  misc_feature (132): Xaa equals any of the naturally occurring L-amino acids
  misc_feature (150): Xaa equals any of the naturally occurring L-amino acids
  misc_feature (153): Xaa equals any of the naturally occurring L-amino acids
  misc_feature (166): Xaa equals any of the naturally occurring L-amino acids
  misc_feature (168): Xaa equals any of the naturally occurring L-amino acids
  misc_feature (217): Xaa equals any of the naturally occurring L-amino acids
  misc_feature (283): Xaa equals any of the naturally occurring L-amino acids
XGASLSFPLVAHWTVAHLEALVEXPGHLLHLLLGQTGQSSHLRTPSSQVPRLLSVLYCTGLSNSYPPRTQAFGSPDSTSPACPLGPRCPVPSTHYLSCPNPLFPPPASPCVPVHPTFSSPLSPGVDSVADFXLSPRYPGSGSISPGTPGXSSXRGIFLGSSRSPSXGXGLGASASVSIFSPILLFFSGFSSWFSASSFSRGVLMPSPFSLGAGVAGXEVQGLLVAEASGVVGDVLVGEEALEERLESALGSGISSGIDQRPLMCSNSCTFFLTRDMTPMRVNXCGDSVPPEGPHRQRFQ

SEQ ID NO: 170 - protein, 186 aa, Homo sapiens
LEPPASDPELQPAERPLPSPGSGEGAPVFLTGPRSQWVLRGAEVVLTCRAGGLPEPTLYWEKDGMALDEVWDSSHFALQPGRAEDGPGASLALRILAARLPDSGVYVCHARNAPRPRAGGALLQVHQPPESPPADPDEGPRAGGGALKCAPKTFWVNEGKHSQVPLLRDGQARARDRMALGGPPAA

SEQ ID NO: 171 - protein, 130 aa, Homo sapiens
  misc_feature (12): Xaa equals any of the naturally occurring L-amino acids
  misc_feature (47): Xaa equals any of the naturally occurring L-amino acids
  misc_feature (65): Xaa equals any of the naturally occurring L-amino acids
  misc_feature (68): Xaa equals any of the naturally occurring L-amino acids
ADQGSYRCIVSXWIAEQGNWQEIQEKAVEVATVVIQPTVLRAAVPKXVSVAEGKELDLTCNITTXRAXDVRPEVTWSFSRMPDSTLPGSRVLARLDRGFPGAQLASCCFESCGCTLLPFTGSGMLAKKTL

SEQ ID NO: 172 - protein, 164 aa, Homo sapiens
  misc_feature (122): Xaa equals any of the naturally occurring L-amino acids
ARVKEFLDSLASKGPEALQEFQQTATTTMVYQQGGNCIYTDSTEVAGSLLELACPVTTSVQPQTQQEQQIQVQQPQQVQVQVQVQQSPQQVSAQLSPQLTVHQPTEQPIQVQVQIQGQAPQXAAPSIQNPVSDRVPVPRQLQQLQNPGGSTCKQPSRSRLQKSR

SEQ ID NO: 173 - protein, 192 aa, Homo sapiens
GRLELSASAFDDGNFSLLIRAVEETDAGLYTCNLHHHYCHLYESLAVRLEVTDGPPATPAYWDGEKEVLAVARGAPALLTCVNRGHVWTDRHVEEAQQVVHWDRQPPGVPHDRADRLLDLYASGERRAYGPLFLRDRVAVGADAFERGDFSLRIEPLEVADEGTYSCHLHHHYCGLHERRVFHLTVAEPHAE

SEQ ID NO: 174 - protein, 290 aa, Homo sapiens
PGSEKVALGTKGPTALNTGAGTMLGPGATPFLSPASVESSVLLCLLVPHPVLSRGPPASPPSSYHPSLGPGGVDSDPSLNMDLNLLSRTRASPLVKTQGTQEGPSGAVALQGHSWRPRGTARCPTTSWRVLPVQLPVRPSRDAGDPGFSALSHGESEGRGLSLGPMAPGRVLHQQDPFEGLQGSPRSPPLPAPQCPSSLLGPVPSPPQGLGLLGAKGPLVLSSLTIPDHGHTCPLVICKYFYWTQFSSELAGTSGCRSSVMTWGRWERPRALPRGGLPCIHDPVCDYQPT

SEQ ID NO: 175 - protein, 141 aa, Homo sapiens
  misc_feature (130): Xaa equals any of the naturally occurring L-amino acids
  misc_feature (140): Xaa equals any of the naturally occurring L-amino acids
EREMLQAPRGRARAALRRLAVATRTMAGGSLALGSVTVHSSEPEVRIPENNPVKLSCAYSGFSSPRVEWKFDQGDTTRLVCYNNKITASYEDRVTFLPTGITFKSVTREDTGTYTCMVSEEGGNSYGESXSSSSCLCLHXG

SEQ ID NO: 176 - protein, 163 aa, Homo sapiens
SFKGPGPSQGEVRLGAGFYDNEGGSADCLAQRVLSHSLVLPAVLRGYAGDGEGAHAQQVSAVHRGVSFQAAVILEPGDVGPGRALHGTAHAALAALGQQVGPQAHQEPGLLAQVGLPVARSLHCEPVALPGDAPGLAGVRGFAGPQLILGHHPEVVFVPGRRP

SEQ ID NO: 177 - protein, 94 aa, Homo sapiens
EKNKISSSYQNRKACGKQSDEEEDRVSLQNLKNLGESATLRSLLLNPHLRQLMVNLDQGEDKAKLMRAYMQEPLFVEFADCCLGIVEPSQNEES

SEQ ID NO: 178 - protein, 200 aa, Homo sapiens
  misc_feature (163): Xaa equals any of the naturally occurring L-amino acids
SGMGEGGGGRDGGTHPYGTRPCLLEVGAWPLPQMFCLCLGLAPPGFGQRPYLGGPGYSPGCRNAGGCSRSSRGSSRGRPMALFFSRGRGDQQSCPGRRGALWRGCLRAWVMVRWVPLMDCHDSLPDLYVQLDLAEVHRLVLLPQVRDPCSCFPLEIRNEAQMXALTASLHGTGVLASALCLASASQGWRLPPQSLHPQRS

SEQ ID NO: 179 - protein, 106 aa, Homo sapiens
AEVAVSQDRATALYLARTTLCLQKKVSEGKRYTKGYTYTASSMMFHLTYTISIFRKQYETNFTLNVANVCNSPVFSLHVRIRRIDFRLTDGCSNKKMNCLGEFELF

SEQ ID NO: 180 - protein, 606 aa, Homo sapiens
SVCSCSNQFSKVVCTRRGLSEVPQGIPSNTRYLNLMENNIQMIQADTFRHLHHLEVLQLGRNSIRQIEVGAFNGLASLNTLELFDNWLTVIPSGAFEYLSKLRELWLRNNPIESIPSYAFNRVPSLMRLDLGELKKLEYISEGAFEGLFNLKYLNLGMCNIKDMPNLTPLVGLEELEMSGNHFPEIRPGSFHGLSSLKKLWVMNSQVSLIERNAFDGLASLVELNLAHNNLSSLPHDLFTPLRYLVELHLHHNPWNCDCDILWLAWWLREYIPTNSTCCGRCHAPMHMRGRYLVEVDQASFQCSAPFIMDAPRDLNISEGRMAELKCRTPPMSSVKWLLPNGTVLSHASRHPRISVLNDGTLNFSHVLLSDTGVYTCMVTNVAGNSNASAYLNVSTAELNTSNYSFFTTVTVETTEISPEDTTRKYKPVPTTSTGYQPAYTTSTTVLIQTTRVPKQVAVPATDTTDKMQTSLDEVMKTTKIIIGCFVAVTLLAAAMLIVFYKLRKRHQQRSTVTAARTVEIIQVDEDIPAATSAAATAAPSGVSGEGAVVLPTIHDHINYNTYKPAHGAHWTENSLGNSLHPTVTTISEPYIIQTHTKDKVQETQI

SEQ ID NO: 181 - protein, 166 aa, Homo sapiens
  misc_feature (72): Xaa equals any of the naturally occurring L-amino acids
EVLVARGVRVKVNEAYRFRVALPAYPASLTDVSLALSELRPNDSGIYRCEVQHGIDDSSDAVGGQGQRGRLXLPRGLCRYAFSFSGAQEACARIGAHIATPEQLYAAYLGGYEQCDAGWLSDQTVSIPSRPHERPVTETWMASPGSGTMVWWTRMTSMMCTVMLKT

SEQ ID NO: 182 - protein, 156 aa, Homo sapiens
DPRVRCSCGEISVHCLPWVLFILDYSLGLNDLNVSPPELTVHVGDSALMGCVFQSTEDKCIFKIDWTLSPGEHAKDEYVLYYYSNLSVPIGRFQNRVHLMGDILCNDGSLLLQDVQEADQGTYICEIRLKGESQVFKKAVVLHVLPEEPKGTQMLT

SEQ ID NO: 183 - protein, 294 aa, Homo sapiens
GKLVRLQVPVRNSRVDPRVRPLLLLSLHGVAASLEVSESPGSIQVARGQTAVLPCTFTTSAALINLNVIWMVTPLSNANQPEQVILYQGGQMFDGAPRFHGRVGFTGTMPATNVSIFINNTQLSDTGTYQCLVNNLPDIGGRNIGVTGLTVLVPPSAPHCQIQGSQDIGSDVILLCSSEEGIPRPTYLWEKLDNTLKLPPTATQDQVQGTVTIRNISALSSGLYQCVASNAIGTSTCLLDLQVISPQPRNIGLIAGAIGTGAVIIIFCIALILGAFFYWRSKIKRRKKKKFLMK

SEQ ID NO: 184 - protein, 255 aa, Homo sapiens
  misc_feature (233): Xaa equals any of the naturally occurring L-amino acids
  misc_feature (238): Xaa equals any of the naturally occurring L-amino acids
QLALVLCTVDSRPPAQLALSHAGRLLASSTAASVPNTLRLELRGPQPRDEGFYSCSARSPLGQANTSLELRLEGVRVILAPEAAVPEGAPITVTCADPAAHAPTLYTWYHNGRWLQEGPAASLSFLVATRAHAGAYSCQAQDAQGTRSSRPAALQVLYAPQDAVLSSFRDSRARSMAVIQCTVDSEPPAELALSHDGKVLATSSGVHSLASGTGHVQVARNALRLQVQDVPAXDDTYXCTAQNCWAQSAPSGGCR

SEQ ID NO: 185 - protein, 163 aa, Homo sapiens
  misc_feature (2): Xaa equals any of the naturally occurring L-amino acids
  misc_feature (131): Xaa equals any of the naturally occurring L-amino acids
  misc_feature (153): Xaa equals any of the naturally occurring L-amino acids
SXRQYRPNSRSTHASGFYVLDSSEYNFHILSSFVLIEHSSMPVEKNITLERPSNVNLTCQFTTSGDLNAVNVTWKKDGEQLENNYLVSATGSTLYTQYRFTIINSKQMGSYSCFFREEKEQRGTLISKSLXFMGKNKPLISYVGDSTVLTCKXQIVSLNWTGT

SEQ ID NO: 186 - protein, 183 aa, Homo sapiens
  misc_feature (136): Xaa equals any of the naturally occurring L-amino acids
  misc_feature (175): Xaa equals any of the naturally occurring L-amino acids
  misc_feature (178): Xaa equals any of the naturally occurring L-amino acids
  misc_feature (179): Xaa equals any of the naturally occurring L-amino acids
FRGLTNLVRLNLSGNLFSSLSQGTFDYLASLRSLEFQTEYLLCDCNILWMHRWVKEKNITVRDTRCVYPKSLQAQPVTGVKQELLTCDPPLELPSFYMTPSHRQVVFEGDSLPFQCMASYIDQDMQVLWYQDGRIXETDESQGIFVEKNMIHNCSLIASALTISNIQAGSTGNWXCMXXPTWE

SEQ ID NO: 187 - protein, 194 aa, Homo sapiens
  misc_feature (127): Xaa equals any of the naturally occurring L-amino acids
  misc_feature (139): Xaa equals any of the naturally occurring L-amino acids
  misc_feature (157): Xaa equals any of the naturally occurring L-amino acids
  misc_feature (163): Xaa equals any of the naturally occurring L-amino acids
  misc_feature (182): Xaa equals any of the naturally occurring L-amino acids
GTLVITALNNHTVGRYQCVARMPAGAVASVPATVTLANLQDFKLDVQHVIEVDEGNTAVIACHLPESHPKAQVRYSVKQEWLEASRGNYLIMPSGNLQIVNASQEDEGMYKCAAYNPVTQEVKTSGXSDRLRVRRPPLXLPDHLPPRGPNHHRHQSXSLILGXCGQWNPTPTGHLGQRMGPXSPATTKTAFLLN

SEQ ID NO: 188 - protein, 179 aa, Homo sapiens
LTVSGPSTVMGAVGESLSVQCRYEEKYKTFNKYWCRQPCLPIWHEMVETGGSEGVVRSDQVIITDHPGDLTFTVTLENLTADDAGKYRCGIATILQEDGLSGFLPDPFFQVQVLVSSASSTENSVKTPASPTRPSQCQGSLPSSTCFLLLPLLKVPLLLSILGAILWVNRPWRTPWTES

SEQ ID NO: 189 - protein, 223 aa, Homo sapiens
  misc_feature (63): Xaa equals any of the naturally occurring L-amino acids
  misc_feature (90): Xaa equals any of the naturally occurring L-amino acids
GCLGKRMILNKALLLGALALTTVMSPCGGEDIVADHVASCGVNLYQFYGPSGQYTHEFDGDEXFYVDLERKETAWRWPEFSKFGGFDPQXALRNMAVAKHNLNIMIKRYNSTAATNEVPEVTVFSKSPVTLGQPNTLICLVDNIFPPVVNITWLSNGHSVTEGVSETSFLSKSDHSFFKISYLTFLPSADEIYDCKVEHWGLDQPLLKHWGASPSTGTEEWTC

SEQ ID NO: 190 - protein, 108 aa, Homo sapiens
  misc_feature (93): Xaa equals any of the naturally occurring L-amino acids
  misc_feature (106): Xaa equals any of the naturally occurring L-amino acids
KNRAGPEAEKRLRRGPEEDGPWGPWDRRGARSQGKGRRARPTSPELESSDDSYVSAGEEPLEAPVFEIPLQNVVVAPGADVLLKCIITANPPXQVSWHKDGSALRXEG

SEQ ID NO: 191 - protein, 144 aa, Homo sapiens
  misc_feature (4): Xaa equals any of the naturally occurring L-amino acids
  misc_feature (81): Xaa equals any of the naturally occurring L-amino acids
  misc_feature (100): Xaa equals any of the naturally occurring L-amino acids
  misc_feature (108): Xaa equals any of the naturally occurring L-amino acids
  misc_feature (109): Xaa equals any of the naturally occurring L-amino acids
  misc_feature (112): Xaa equals any of the naturally occurring L-amino acids
  misc_feature (113): Xaa equals any of the naturally occurring L-amino acids
  misc_feature (117): Xaa equals any of the naturally occurring L-amino acids
  misc_feature (119): Xaa equals any of the naturally occurring L-amino acids
GPEXSSPRLHVAVAPNTLRLEIHGAMLEDEGVYICEASNTLGQASASADFDAQAVNVQVWPGATVREGQLVNLTCLVWTTXPAQLTYTWYQDGQQRLDAXSIPLPNVXXRDXXSYRXGXGPPGRAPRLSRPITLDVSTRPATCA

SEQ ID NO: 192 - protein, 124 aa, Homo sapiens
  misc_feature (102): Xaa equals any of the naturally occurring L-amino acids
LPFNFVDPNMDSREGEDKELKIDLEVFEMPPRFIMPICDFKIPENSDAVFKCSVIGIPTPEVKWYKEYMCIEPDNIKYVISEEKGSHTLKIRNVCLSDSAHXRCRAVELCRRGYLSGIPHHGRF

SEQ ID NO: 193 - protein, 78 aa, Homo sapiens
  misc_feature (39): Xaa equals any of the naturally occurring L-amino acids
QNSPGQRGSISCSIRNPAIPHGWFLSGSGDTLQPPADIXNLRPRDCCCGTVCLTPASSPLLSARRMGVTAQTFPLDRL

SEQ ID NO: 194 - protein, 315 aa, Homo sapiens
  misc_feature (121): Xaa equals any of the naturally occurring L-amino acids
  misc_feature (252): Xaa equals any of the naturally occurring L-amino acids
LWTISNPVTLTCDATGIPPPTIAWLKNHKRIENSDSLEVRILSGGSKLQIARSQHSDSGNYTCIASNMEGKAQKYYFLSIQVPPSVAGAEIPSDVSVLLGENVELVCNANGIPTPLIQWLXDGKPIASGETERIRVSANGSTLNIYGALTSDTGKYTCVATNPAGEEDRIFNLNVYVTPTIRGNKDEAEKLMTLVDTSINIECRATGTPPPQINWLKNGLPLPLSSHIRLLAAGQVIRIVRAQVSDVAVYTXVASNRAGVDNKHYNLQVFAPRKKKKKKKKKKKKKKKKKKKKGGRSRGSLEGPQVTRACDVIAL

SEQ ID NO: 195 - protein, 204 aa, Homo sapiens
  misc_feature (196): Xaa equals any of the naturally occurring L-amino acids
HYRRYACRYRSGIPGSTHASAHASAHASVTAEHSGNYSCDADNGLGAQHSHGVSLRVTVPVSRPVLTLRAPGAQAVVGDLLELHCESLRGSFPILYWFYHEDDTLGNISAHSGGGASFNLSLTTEHSGNYSCEADNGLGAQHSKVVTLNVTGTSRNRTGLTAAGITGLVLSILVLAAAAALLHYARARRKPGGLSXTGTSSHKS

SEQ ID NO: 196 - protein, 387 aa, Homo sapiens
MIQWQPPSESHQNGILKGYIIRYCLAGLPVGYQFKNITDADVNNLLLEDLIIWTNYEIEVAAYNSAGLGVYSSKVTEWTLQGVPTVPPGNVHAEATNSTTIRFTWNAPSPQFINGINQGYKLIAWEPEQEEEVTMVTARPNFQDSIHVGFVSGLKKFTEYFTSVLCFTTPGDGPRSTPQLVRTHEDGRHPPALLFLPPPAQGQAGRPRQKGGPGLSPRLRYPQITTGYLTDGGLSLALTGLGGWGFLWGAVPGPVGHLSFSEILDTSLKVSWQEPGEKNGILTGYRISWEEYNRTNTRVTHYLPNVTLEYRVTGLTALTTYTIEVAAMTSKGQGQVSASTISSGVPPGKCPLSRQDSLSSPEQRPIQEAPCRLGVVAHACSPSTLGG

SEQ ID NO: 197 - protein, 164 aa, Homo sapiens
  misc_feature (153): Xaa equals any of the naturally occurring L-amino acids
NTTHYRESWYACRYRSGIPGSTHASASTFLIIDPLLGLLKIQETQDLDAGDYTCVAINEAGRATGKITLDVGSPPVFIQEPADVSMEIGSNVTLPCYVQGYPEPTIKWRRLDNMPIFSRPFSVSSISQLRTGALFILSRLKEIYFVRICTFMXYIYALYIGIAI

SEQ ID NO: 198 - protein, 159 aa, Homo sapiens
  misc_feature (121): Xaa equals any of the naturally occurring L-amino acids
  misc_feature (139): Xaa equals any of the naturally occurring L-amino acids
  misc_feature (146): Xaa equals any of the naturally occurring L-amino acids
  misc_feature (149): Xaa equals any of the naturally occurring L-amino acids
PTHSARRGTYKCIATNKTGQNSFSLELSVVAKEVKKAPVILEKLQNCGVPEGHPVRLECRVIGMPPPVFYWKKDNETIPCTRERISMHQDTTGYACLLIQPAKKSDAGWYTLSAKNEAGIXSCTARLDIYAQWHHQIPXPCLPAQXQSXRISNSKGLDI

SEQ ID NO: 199 - protein, 151 aa, Homo sapiens
  misc_feature (134): Xaa equals any of the naturally occurring L-amino acids
FRAGNDISWKAPVATNNPAWAVQEETRDRFHLLGDPQTKNCTLSIRDARMSDAGRYFFRMEKGNIKWNYKYDQLSVNVTAPAPRHQPHLSGDLAWGRRDHEQDHPTQCVLPSSELDCDCLPRRRAQHPQLWGNXFISFSPRGASLCAWSVC

SEQ ID NO: 200 - protein, 244 aa, Homo sapiens
  misc_feature (230): Xaa equals any of the naturally occurring L-amino acids
  misc_feature (240): Xaa equals any of the naturally occurring L-amino acids
  misc_feature (243): Xaa equals any of the naturally occurring L-amino acids
  misc_feature (244): Xaa equals any of the naturally occurring L-amino acids
TTSSRSFKHSRSAAVTSEFHLVPSRSMNGQPLTCVVSHPGLLQDQRITHILHVSFLAEASVRGLEDQNLWHIGREGAMLKCLSEGQPPPSYNWTRLDGPLPSGVRVDGDTLGFPPLTTEHSGIYVCHVSNEFSSRDSQVTVDVLDPQEDSGKQVDLVSASVVVVGVIAALLFCLLVVVVVLMSRYHRRKAQQMTQKYEEELTLTRENSIRRLHSHHTDPRSQPEESVGLXAEGHPDSLKXNNXX

SEQ ID NO: 201 - protein, 132 aa, Homo sapiens
  misc_feature (10): Xaa equals any of the naturally occurring L-amino acids
  misc_feature (32): Xaa equals any of the naturally occurring L-amino acids
SSAVTSTGGXRAPSPVSALSVSAQPQSDTRAXFHPLWCEAQRGQHLEELCSLHTYHDLPGLGSGKTSHSWLDREKCKQFVEQHTPQLLTLVPRGWDAHTTCQAPCTQRLDFTATCNSKFRRIKNGNIQNSKR

SEQ ID NO: 202 - protein, 524 aa, Homo sapiens
  misc_feature (138): Xaa equals any of the naturally occurring L-amino acids
  misc_feature (428): Xaa equals any of the naturally occurring L-amino acids
  misc_feature (450): Xaa equals any of the naturally occurring L-amino acids
  misc_feature (515): Xaa equals any of the naturally occurring L-amino acids
  misc_feature (516): Xaa equals any of the naturally occurring L-amino acids
GTSEDSGSYNFRFEISEVNRWSDVKGTLVTVTEEPRVPTIASPVELLEGTEVDFNCSTPYVCLQEQVRLQWQGQDPARSVTFNSQKFEPTGVGHLETLHMAMSWQDHGRILRCQLSVANHRAQSEIHLQVKYAPKGVXILLSPSGRNILPGELVTLTCQVNSSYPAVSSIKWLKDGVRLQTKTGVLHLPQAAWSDAGVYTCQAENGVGSLVSPPISLHIFMAEVQVSPAGPILENQTVTLVCNTPNEAPSDLRYSWYKNHVLLEDAHSHTLRLHLATRADTGFYFCEVQNVHGSERSGPVSVVVNHPPLTPVLTAFLETQAGLVGILHCSVVSEPLATLVLSHGGHILASTSGDSDHSPRFSGTSGPNSLRLEIRDLEETDSGEYKCSATNSLGNATSTLDFHANAARLLISPAAEVVEGQAVTLSCXSGLSPTPDARFSWYLNGALLHXGPGSSLLLPAASSTDAGSYHCRARDGHSASGPSSPAVLTVLYPPRQPTFTTRLDLDAAGAGAGRXXLLLCRVDS

SEQ ID NO: 203 - protein, 36 aa, Homo sapiens
  misc_feature (16): Xaa equals any of the naturally occurring L-amino acids
MSHCWTLLALSLWGLXVSQGRETWWRWPHGLGPPCS

SEQ ID NO: 204 - protein, 173 aa, Homo sapiens
  misc_feature (39): Xaa equals any of the naturally occurring L-amino acids
  misc_feature (41): Xaa equals any of the naturally occurring L-amino acids
  misc_feature (68): Xaa equals any of the naturally occurring L-amino acids
  misc_feature (104): Xaa equals any of the naturally occurring L-amino acids
QTYYRLDISPSQQQPHSINISLSVFPVPNHSRHISGSDXWXGNVYKGDASISISNPTIKDNGTFSCAXKNPPDVHHNIPMTELTVTERGFGTMLSSVALLSILXFVPSAVVVALLLVRMGRKAAGLKKRSRSGYKKSSIEVSDDTDQEEEEACMARLCVRCAECLDSDYEETY

SEQ ID NO: 205 - protein, 258 aa, Homo sapiens
PPIMPGWLTLPTLCRFLLWAFTIFHKAQGDPASHPGPHYLLPPIHEVIHSHRGATATLPCVLGTTPPSYKVRWSKVEPGELRETLILITNGLHARGYGPLGGRARMRRGHRLDASLVIAGVRLEDEGRYRCELINGIEDESVALTLSLEGVVFPYQPSRGRYQFNYYEAKQACEEQDGRLATYSQLYQAWTEGLDWCNAGWLLEGSVRYPVLTARAPCGGRGRPGIRSYGPRDRMRDRYDAFCFTSALAGQVFFVPGG

SEQ ID NO: 206 - protein, 144 aa, Homo sapiens
  misc_feature (47): Xaa equals any of the naturally occurring L-amino acids
GPAINMFCFLICDCRGEAAHKWSLPEMVSKESERLSITKSACGRNGXQFCSTLTLNTAQANHTGFYSCKYLAVPTSKKKETESAIYIFISGKTSIFYILFAFALQMSHKSTLIHWKGCFPSEYERNGLGKRFHPSCRHFRGCQF

SEQ ID NO: 207 - protein, 54 aa, Homo sapiens
  misc_feature (37): Xaa equals any of the naturally occurring L-amino acids
IRHEIPWQSKKVGTSVISCDLQSANHRHPASHERGFXGKGEHYSLREMGEGMPK

SEQ ID NO: 208 - protein, 99 aa, Homo sapiens
  misc_feature (1): Xaa equals any of the naturally occurring L-amino acids
  misc_feature (9): Xaa equals any of the naturally occurring L-amino acids
XRTRLWFVXDRPQINGKYILHDNGTLVIKEATAYDRGNYICKAQNSVGHTLITVPVMIVAYPPRITNRPPRSIVTRTGAAFQLHCVPWESQARNHVGDA

SEQ ID NO: 209 - protein, 127 aa, Homo sapiens
LKPAKIDHKQYFRKQVLHGKDFQVDCKASGSPVPEISWSLPDGTMINNAMQADDSGHRTRRYTLFNNGTLYFNKVGVAEEGDYTCYAQNTLGKDEMKVHLTVITAAPRIRQSNKTNKRIKAGDTACP

SEQ ID NO: 210 - protein, 345 aa, Homo sapiens
GTSRADLPRPEVAPLRGLPRPKFSAPRGLRAPRSPRPEVSARTMRLGSPGLLFLLFSSLRADTQEKEVRAMVGSDVELSCACPEGSRFDLNDVYVYWQTSESKTVVTYHIPQNSSLENVDSRYRNRALMSPAGMLRGDFSLRLFNVTPQDEQKFHCLVLSQSLGFQEVLSIEVTLHVAANFSVPVVSAPHSPSQDELTFTCTSINGYPRPNVYWINKTDNSLLDQALQNDTVFLNMRGLYDVVSVLRIARTPSVNIGCCIENVLLQQNLTVGSQTGNDIGERDKITENPVSTGEKNAATWSILAVLCLLVVVAVAIGWVCRDRCLQHSYAGAWAVSPETELTGHV

SEQ ID NO: 211 - protein, 86 aa, Homo sapiens
DRRVFGLKRRLGVRSSRTASVLAGVTRGCLQGTRSQELFCPERSNLASGRKPQDPLMCVPTSVVSPSTPEEPPEVPLGFKGPSGHN

SEQ ID NO: 212 - protein, 344 aa, Homo sapiens
  misc_feature (170): Xaa equals any of the naturally occurring L-amino acids
QSRADLPRPEVAPLRGLPRPKFSAPRGLRAPRSPRPEVSARTMRLGSPGLLFLLFSSLRADTQEKEVRAMVGSDVELSCACPEGSRFDLNDVYVYWQTSESKTVVTYHIPQNSSLENVDSRYRNRALMSPAGMLRGDFSLRLFNVTPQDEQKFHCLVLSQSLGFQEVLSXEVTLHVAANFSVPVVSAPHSPSQDELTFTCTSINGYPRPNVYWINKTDNSLLDQALQNDTVFLNMRGLYDVVSVLRIARTPSVNIGCCIENVLLQQNLTVGSQTGNDIGERDKITENPVSTGEKNAATWSILAVLCLLVVVAVAIGWVCRDRCLQHSYAGAWAVSPETELTGHV

SEQ ID NO: 213 - protein, 357 aa, Homo sapiens
  misc_feature (99): Xaa equals any of the naturally occurring L-amino acids
  misc_feature (237): Xaa equals any of the naturally occurring L-amino acids
  misc_feature (239): Xaa equals any of the naturally occurring L-amino acids
  misc_feature (290): Xaa equals any of the naturally occurring L-amino acids
  misc_feature (357): Xaa equals any of the naturally occurring L-amino acids
LLFNNRLVHLDEHAFHGLRALSHLYLGCNELASFSFDHLHGLSATHLLTLDLSSNRLGHISVPELAALPAFLKNGLYLHNNPLPCDCRLYHLLQRWHQXGLSAVRDFAREYVCLAFKVPASRVRFFQHSRVFENCSSAPALGLERPEEHLYALVGRSLRLYCNTSVPAMRIAWVSPQQELLRAPGSRDGSIAVLADGSLAIGNVQEQHAGLFVCLATGPRLHHNQTHEYNVSVHFPXPXPEAFNTGFTTLLGCAVGLVLVLLYLFAPPCRCCRRACRCRRWPQTPSPLQXLSAQSSVLSTTPPDAPSRKASVHKHVVFLEPGRRGLNGRVQLAVAEEFDLYNPGGLQLKAGSESAAX

SEQ ID NO: 214 - protein, 204 aa, Homo sapiens
  misc_feature (142): Xaa equals any of the naturally occurring L-amino acids
  misc_feature (172): Xaa equals any of the naturally occurring L-amino acids
  misc_feature (174): Xaa equals any of the naturally occurring L-amino acids
RSRTSGSPGLQEFGTSTIQNRADLVINEVMWWDHGVYYCTIEAPGDTSGDPDKEVKLIVLHWLTVIFIILGALLLLLLIGVCWCQCCPQYCCCYIRCPCCPAHCCCPEEALARHRYMKQAQALGPQMMGKPLYWGADRSSQXSSYPMHPLLQRDLSLPSSLPQMPMTQTTNXPXIANGVLEYLEKELRNLNLAQPLPPDLKGRF

SEQ ID NO: 215 - protein, 203 aa, Homo sapiens
  misc_feature (7): Xaa equals any of the naturally occurring L-amino acids
  misc_feature (60): Xaa equals any of the naturally occurring L-amino acids
  misc_feature (179): Xaa equals any of the naturally occurring L-amino acids
  misc_feature (183): Xaa equals any of the naturally occurring L-amino acids
RPRCWRXPAPEVCAALNVTVSPGPVVDYLEGENATLLCHVSQKRRKDSLLAVRWFFAHSXDSQEALMVKMTKLRVVQYYGNFSRSAKRRRLRLLEEQRGALYRLSVLTLQPSDQGHYVCRVQEISRHRNKWTAWSNGSSATEMRVISLKASEESSFEKTKETWAFFEDLYVYAVLVCCXGILXFCSSCWSSSGSLCLTSGNPE

SEQ ID NO: 216 - protein, 122 aa, Homo sapiens
EVLTHPFPKEHRCWPSEDTLERMGLFTVCQAQSPLIQPLRVSAARCPQGRRVGSTRQAGKCVLKTLLLPSALPIATLCVNSNGFEWGSGCMGKLLCGPLGHRNLGLTGRGSILKAPSCQLCY

SEQ ID NO: 217 - protein, 147 aa, Homo sapiens
  misc_feature (142): Xaa equals any of the naturally occurring L-amino acids
ASPPWRLCCFFSLELFLHPVLRASSSTPIEGSPMTLTCETQLSPQRPDVQLQFSLFRDSQTLGLGWSRSPRLQIPAMWTEDSGSYWCEVETVTHSIKKRSLRSQIRVQSECLRGCSSRVRAGERKASDISCTPRMVDITERXVQLFW

SEQ ID NO: 218 - protein, 116 aa, Homo sapiens
  misc_feature (54): Xaa equals any of the naturally occurring L-amino acids
  misc_feature (105): Xaa equals any of the naturally occurring L-amino acids
  misc_feature (114): Xaa equals any of the naturally occurring L-amino acids
NLSFICSAASSSDSPMTLGWKKDNELLHDAEMENYAHLRAQGGEVMEYTTILRXREVEFASEGKYQCVISNHFGSSYSVKAKLTVNMLPSFTKDPHGISPSELGXWHAWGCAAXGG

SEQ ID NO: 219 - protein, 226 aa, Homo sapiens
  misc_feature (156): Xaa equals any of the naturally occurring L-amino acids
LARGAFSGLDKLRRLILQGNRIRSITKKAFTGLDALEHLDLSDNAIMSLQGNAFSQMKKLQQLHLNTSSLLCDCQLKWLPQWVAENNFQSFVNASCAHPQLLKGRSIFAVSPDGFVCDDFPKPQITVQPETQSAIKGSNLSFICSAASSSDSPMTXAWKKDNELLHDAEMENYAHLRAQGGEVMEYTTILRLREVEFASEGKYQCVISNHFGSSYSVKAKLTVNSM

SEQ ID NO: 220 - protein, 37 aa, Homo sapiens
  misc_feature (29): Xaa equals any of the naturally occurring L-amino acids
  misc_feature (35): Xaa equals any of the naturally occurring L-amino acids
IIPALYHFLNRSYFIIFCTLYLIKCVNLXAQAPIXYQ

SEQ ID NO: 221 - protein, 162 aa, Homo sapiens
LTTVVLLCLLTPSWTSTGRMWSHLNRLLFWSIFSSVTCRKAVLDCEAMKTNEFPSPCLDSKTKVVMKGQNVSMFCSHKNKSLQITYSLFRRKTHLGTQDGKGEPAIFNLSITEAHESGPYKCKAQVTSCSKYSRDFSFTIVDPVTSPVLEHYGHSNRNRPYI

SEQ ID NO: 222 - protein, 140 aa, Homo sapiens
LRLSQAQGNLSVLETRQVQLECVVLNRTSITSQLMVEWFVWKPNHPERETVARLSRDATFHYGEQAAKNNLKGRLHLESPSPGVYRLFIQNVAVQDSGTYSCHVEEWLPSPSGMWYKRAEDTAGQTALDIHATRCFPCRW

SEQ ID NO: 223 - protein, 63 aa, Homo sapiens
IIFAGGDKWSVDPRVSISTLNKRDYSLQIQNVDVTDDGPYTCSVQTQHTPRTMQVHLNCASSS

SEQ ID NO: 224 - protein, 82 aa, Homo sapiens
  misc_feature (82): Xaa equals any of the naturally occurring L-amino acids
NSAQVGWTGTQGEAGGETGDLGKRGNGWKGPDTWVPEGMQGRWSLGNRMLGSWAGSCLKGQYSTVQISSLGTWEEGVLRCEX

SEQ ID NO: 225 - protein, 114 aa, Homo sapiens
  misc_feature (19): Xaa equals any of the naturally occurring L-amino acids
  misc_feature (20): Xaa equals any of the naturally occurring L-amino acids
  misc_feature (105): Xaa equals any of the naturally occurring L-amino acids
HDSTDGRGRGDGLLLPRQXXPSYSLEIQWWYVRSHRDWTDKQAWASNQVVKVVGSNISHKLRLSRVKPTDEGTYECRVIDFSDGKARHHKVKAYCGCSQGRIRLXCPKPFRRAV

SEQ ID NO: 226 - protein, 174 aa, Homo sapiens
  misc_feature (99): Xaa equals any of the naturally occurring L-amino acids
  misc_feature (104): Xaa equals any of the naturally occurring L-amino acids
  misc_feature (133): Xaa equals any of the naturally occurring L-amino acids
  misc_feature (145): Xaa equals any of the naturally occurring L-amino acids
  misc_feature (169): Xaa equals any of the naturally occurring L-amino acids
AGGQQTLGHQPALVHPPAARQVHSEGSVLPGARPEPEAPVPGGPAVPLLPQGCECCMSCAVQGSPRPHVTWFKNDRSLEGNPAVYSTDLLGVCSLTIPXVSPKXSGEYKAVAENTLGQAVSTATLIVIEPSTXPHLTLGWSWTLXSFTSDTCTGPGSQSQGWKLCPEPXENGSE

SEQ ID NO: 227 - protein, 134 aa, Homo sapiens
  misc_feature (3): Xaa equals any of the naturally occurring L-amino acids
  misc_feature (107): Xaa equals any of the naturally occurring L-amino acids
  misc_feature (116): Xaa equals any of the naturally occurring L-amino acids
  misc_feature (134): Xaa equals any of the naturally occurring L-amino acids
QQXGTLCINYANEKLQQHFVAHYLRAQQEEYAVEGLEWSFINYQDNQPCLDLIEGSPISICSLINEVGRNAASIDPAAAAQLQTRIETALEAAPAWATISSAGSPAXLWCIMRGLXGTTQQAWWRRTRTLSHLX

SEQ ID NO: 228 - protein, 105 aa, Homo sapiens
  misc_feature (12): Xaa equals any of the naturally occurring L-amino acids
  misc_feature (102): Xaa equals any of the naturally occurring L-amino acids
  misc_feature (103): Xaa equals any of the naturally occurring L-amino acids
DSSTVKGGSESXHLCLIPDLKGKARTRISNLRKEDQSVYFCQVQLDIQIREAVVAVHQGDPPHHHPGPQAAPPQGPSPAWTALLVSPVPWRRTRPWVGPCCXXCC

SEQ ID NO: 229 - protein, 281 aa, Homo sapiens
  misc_feature (6): Xaa equals any of the naturally occurring L-amino acids
  misc_feature (10): Xaa equals any of the naturally occurring L-amino acids
RHAQSXPLVXWQELEMSGNHFPEIRPGSFHGLSSLKKLWVMNSQVSLIERNAFDGLASLVELNLAHNNLSSLPHDLFTPLRYLVELHLHHNPWNCDCDILWLAWWLREYIPTNSTCCGRCHAPMHMRGRYLVEVDQASFQCSAPFIMDAPRDLNISEGRMAELKCRTPPMSSVKWLLPNGTVLSHASRHPRISVLNDGTLNFSHVLLSDTGVYTCMVTNVAGNSNASAYLNVSTAELNTSNYSFFTTVTVETTEISPEDTTRKYKPVPTTSTGYQPAYTTS

SEQ ID NO: 230 - protein, 259 aa, Homo sapiens
  misc_feature (191): Xaa equals any of the naturally occurring L-amino acids
  misc_feature (205): Xaa equals any of the naturally occurring L-amino acids
  misc_feature (226): Xaa equals any of the naturally occurring L-amino acids
  misc_feature (258): Xaa equals any of the naturally occurring L-amino acids
NSRVDPRVRPLLLLSLHGVAASLEVSESPGSIQVARGQTAVLPCTFTTSAALINLNVIWMVTPLSNANQPEQVILYQGGQMFDGAPRFHGRVGFTGTMPATNVSIFINNTQLSDTGTYQCLVNNLPDIGGRNIGVTGLTVLVPPSAPHCQIQGSQDIGSDVILLCSSEEGIPRPTYLWEKLDNTLKLPQQXLRTRSREQSPSGTXVPCLQVCTKCVASNAIGTSTXLLDLQVISPQPRNIGLIAGAIALVQLLSFFAXH

SEQ ID NO: 231 - protein, 158 aa, Homo sapiens
  misc_feature (69): Xaa equals any of the naturally occurring L-amino acids
LTVSGPSTVMGAVGESLSVQCRYEEKYKTFNKYWCRQPCLPIWHEMVETGGSEGVVRSDQVIITDHPGXLTFTVTLENLTADDAGKYRCGIATILQEDGLSGFLPDPFFQVQVLVSSASSTENSVKTPASPTRPSQCQGSLPSSTCFLLLPLLKVPLL

SEQ ID NO: 232 - protein, 99 aa, Homo sapiens
  misc_feature (4): Xaa equals any of the naturally occurring L-amino acids
  misc_feature (71): Xaa equals any of the naturally occurring L-amino acids
  misc_feature (72): Xaa equals any of the naturally occurring L-amino acids
PAVXLRNMAVAKHNLNIMIKRYNSTAATNEVPEVTVFSKSPVTLGQPNTLICLVDNIFPPVVNITWLSNGXXVTEGVSETSFLSKSDHPSSRSVTSPSS

SEQ ID NO: 233 - DNA, 27 bp, Homo sapiens
gcggcaagctttttgcaaagcctaggc

SEQ ID NO: 234 - DNA, 27 bp, Homo sapiens
gcggcaagctttttgcaaagcctaggc

SEQ ID NO: 235 - protein, 19 aa, Homo sapiens
  misc_feature (18): Xaa equals any of the naturally occurring L-amino acids
FIGLLDVYGFESFPDNSXE

SEQ ID NO: 236 - protein, 10 aa, Homo sapiens
EECRLNRPSS

SEQ ID NO: 237 - protein, 73 aa, Homo sapiens
  misc_feature (16): Xaa equals any of the naturally occurring L-amino acids
  misc_feature (43): Xaa equals any of the naturally occurring L-amino acids
  misc_feature (72): Xaa equals any of the naturally occurring L-amino acids
GSPCLGHNKLSREPSXIVVHYAGPVRYHTAGLVEKNKDPIPPXLTRLLQQSQDPLLMGLFPTNPKEKTQEEXP

SEQ ID NO: 238 - protein, 36 aa, Homo sapiens
  misc_feature (16): Xaa equals any of the naturally occurring L-amino acids
  misc_feature (21): Xaa equals any of the naturally occurring L-amino acids
IIYPPEAQTIIVTKAXVSFLXCVASGIPPPRVTWAK

SEQ ID NO: 239 - protein, 15 aa, Homo sapiens
  misc_feature (5): Xaa equals any of the naturally occurring L-amino acids
KDGSXVTGYNKDRFX

SEQ ID NO: 240 - DNA, 744 bp, Homo sapiens
actggcttctacttctgtgagggtgcagaaacgtccatggcagcgagcgctcggggccctgtcagcgtggtagtcaaccgtaagaggccagggtggggtggcactggacacagtcagagcaggaccagatggtggagccccaaggaagggttggggtcctgggcatgggaacttcaaggccacttacctggaggtggccttgagctcatgtcccagctctgcacacctgggcaatgctttgacctccctagttccctcctattttatatttggaagtttaaacttatgaaaagttgcagagaaagacaaataatgattatatacctttaacctagatttcccatttattaacattttggcacatttgcttaatctttctcgctgtctacacagacacacacacgcacatacatacatataaatgtatggatatagacttgcatatatacaggtgcacttgtgtgtatgcacatccactctatgtggacatgtgcacttatacatatatggacactaaaaaaacatatgcatatgttatttatgtatctacctacatatttatattcctgaagttgcagacatgaggcttctttaccgctaaattcctaagatcattctcttacatatccacaatgcaatgatcatgatcaggaaaattagcattgatagaagacttttttttttttttgagatggagtctcactgtgttgcccaggctggagtgcaatggtgctatcttggctc

SEQ ID NO: 241 - DNA, 251 bp, Homo sapiens
gaactagggaggtcaaagcattgcccaggtgtgcagagctgggacatgagctcaagcacacctccaggtaagtggccttgaagttcccatgcccaggaccccaacccttccttggggctccaccatctggtcctgctctgactgtgtccagtgccaccccaccctggcctcttacggttgactaccacgctgacagggcccgagcgctcgctgccatggacgttctgcacctcacagaagtagaagccagt

SEQ ID NO: 242 - DNA, 10236 bp, Homo sapiens
ttatgcataagaatacacataatgtatatttgtatgtgtatatactcatacataaacatatatgcataatataaatatacatatgtatgagaatgtttactatgtaacaaaattatatgatcacaaaacaagttatttcagaaagtgctcccaccaagcaagccactctgtgaattgccattgcctcctagtggctgctgcagttattacaggtgaaaatatctagctggaggcaaagggaggccttctgctggctggaaactgcccttaccaggactgaaaaagacatatttctgcacaaaattcacagcacccagcccaaagtctgaccagagtagtccccagggcatcagagtctaccatatcttcagaagactgacactcacctcggacctggaagaagagtgaggtgttggatgatccaagaacatttgtggcctcacagcggtagctgccagagtccccaaggcccagttctcggacctctaacttcagggagttggcctcagctttagcctggaaccgaccatgggatgggacctggggacccaggctggtggccaggaggtgctccccatggaacaaggccagcaaggccagggggcggctgtccacagtgcagatgaacagagccatgtggccctggcccatgtctaggagggctgacagctttggacggtccgggggatctgcaggaacagagggagctgaggccacccagcctagctcaccacattacaactgccacactatgtcccccacctcctgccacacacacagcctaagccatgctctttcctccccaaaccccagcccggcccctgcttctccccagaccacccctccaccctccaagtccccaggctgcccatgccagtcacccacagagtacactcaggagcacgggagtggagagctgggcaccagcctcagtcaggatgcggcaggcgtaaagggcagcatcagttctggccacgggcagcagtgtcacggtctccaggggaccctgggcccacagcaccccatttcggaaccaggagaagttagcagggctgccagcagcttcccggctcacgttgcaagtcaagttggcttctgtgccctcctgaagtgtgtgtgatggtgcaatggccaggacagtggctggagagcaggcggcacagcttactgaccacccccggcccccaggagccaggggtccagccgcccagcctggaaggagcaggaaggaggccccctggggtgcccacagggttggggagaaaagcaagctagctcacagggcagcctaggagaagtgggccctggggactgtgggggccctgggcagagagggttgcagtacagggaaggaggacaaggcagcccaactgtcccagctggggagtccttcctcagagaccagctgtgttgcctatccccggcctgaacagagatcatgggaaggagcagctccgctcttcctgaatgtggaggagggcagcgaagggcccccactgctgcacagagtggttttgcctgattagatcctcctcggagcagaacagtccagagctccagcccctgcccccaggccacccattccctgcctgactcaccctggccattgaaggtggctgaggtggaggcgttgcccagggcattgctggcctcacagaggtacaagccctcctcttccagcaaagggttgtgaatctccacacgcagcaagttgggggctttggtgaccttcatgcgtggggaacagcccccacaggtgctgcagccaccccctgatggcagggaagtggccacaacacggtccttgtggagcagctgcagcctggcgggggggtcgctgtccacacggcacaaaaggaggcctcgccgtccagccccggccccagcggcatcaaggtccagcctggtggtgaatgttggttgtcgaggggggtctgcagggaggaagaacatgggcactcatcccacggatgctccagggccccacaagcctggctaggctcccagaatacactggacaaaggcagatcccgaaggctgccccaagcagctgtgcagactgtgcactgcacaagggcagccagaccagggtgggtggaactcaagctaggctcatgctcctcaagctaagctgtgccctgatgcctactgagtcttcccagaagaaggagcaccattttctagctcagacaaaggtgctgtatgggctggctgccaccttgcataagtcccatctgctgctgagcagggtgcccacctagcaatccctgggggtcatgctgtctgctcccaccctgcacccaatgccttaccacggagcctcccctcaagatctgccctgcagcttatctgtgatctccaagccagctcctgtgatactagcgaatgcatagaatggcctcttcctgaaggcttctggagacagttggccaaaagagagcaatcagccaaggcccccatgtgatctcactcagacaccagaaaactttgcagaggcagctgccctctgacagttccgggacgtggctccggcacacatgtgtcaggggaagcctctggaatcaggcccttggtcttacacggagcctccccgcttggcggatgcagaggggctgtctgtccctgtgctgaggggctttgccttggtgtctatgggagcccagcacagcctgtggggcatgtgcacaaatagaggagtgtggtgtcccagggctcacccatgaggacaaagcatggatgtggtgcccatgctgagcttgaggctgggacagaggagcccacagggctggcattggagggtaaagacatggggaggtagagaaggccccagcctcatttcctaaacttcagccccacatggaaagacccactgtggccaggtctgtgacccagccctcccgatatagaccgtggggcagggcaggacagggctggggggcctagaggaggtggggtggctggtgggtcccggcaggaggctgcaacaggtggtggctgctcacagagcacagtgagaacagctggcgaagaggggccactggcactgtggccgtcccgggcccggcagtggtatgagccggcgtcagtgctggaggccgcggggagcaggaggctgctgccgggaccctcgtgaagcagggctccattcaggtaccaggagaagcgggcatcaggtgtggggcttaggccgcttctgcagctcagtgtcactgcctgtccttccaccacctcggctgccgggctgatgaggagacgggcggctgcggggagaggaagaggctgggaagggtccctcctctcaaccccacatgctgccctatatagaaagccttccagggttctcctttccccacactactgtaggtagctctgggctttgtggtgcatcaggagggtttgccctttaatgccaaatcagatctattggtagtagatggctgcagcatggttgaagattcagagccagagcccaggcttatgtccaacacctggcttggctgggcatggtagctcatgcctgtaatcttagcactttgggagactgaggcagaaggatcgtttgaggccaggagttccagaccagcctaggcaacatagtgagactccatctcaaacaattttttttttttgagactgagtctcactctgtctcccaggctggagtgcagtggtgtgatcctggctcactgcaacctctgcctcccaggttcaagcgattctcctgcctcagcctcccaagtagctgggattacaggtgtgccaccacacccagctaatgttatacatgtagtagagatagggtttcaccatgttagccaggcagatctcgaactcccgacctctggtgatccacccgcctcagcctcccaaagtgctgggattacaggtgtgagccactgtggccagctttttttttttttttttttttttttttttgagacggagtcttgctccgtcagccaggctggagtgcagtggcgcaatctcagctcgctacaacctctgcctcccaggttcaagcaattatcctgcctcagcctccctagtagctgggaccacaggtgtgcgccaccacacccggctaatttttgtatttttagtggagacggggtttcaccacgttggccaggctgatctcaagctcctgacctcaggtgatctgcctgcctcggcctcccaaagtgctggaattacaggcatgagccaccatgcctggccacaattttttttttttaattagctgggtgtggtgacatgggccgtagtctcagctatttgggaggctgagatgggaggatggcttgagcccaggagtttgaggctgcagtgagccatgaacataccattgcactccggcctgggcaacagagcaacaccctatctcaaaaaacaaaaagaaaaacctggcttgatcaattagctaccatgccctcaggaggagggaaggacagtgcacataccgaaagttggaagaccgtacttttcttttttctttttcttttttttttttttttttttgagacagagtctcactcttgtcacccaggctggagtgcagtggcgctatcttggcccactacaacttccacctcctgggttcaagcgattctcctgccttagcctcccaggtagctgggactacaggaactcaccaccatgcccagctaatttttgtatttttagtagagatgggatttcaccatgttggccaggatggtctcgatctcttgacctcgtgatccacccacctcggcctcccaaagtgctgggattacaggagtgagccaccacgcccagccagaagaccctacttttctatttggcttcccacatctgactgctagcatagagcctgctcccagagtttcataattaaaaaacaatgaatgcttctgagggactctccaagtttagggtcagggtaggtgcaaaaggaatgatgtgacctgttgtgtttccctttttcccttgacttccaggaagctctgccgttgggtcactgcacagcccctgtcttttatgtggcgtagccagttagctcagtcctgcggttgagtccactagacttctagaaggaacagactggagcaggctcctcctcaggctccctccactctccctggctgccagtgcccatcttaccattggcatggaagtccagggtggaggttgcatttccaagggagttggtggctgagcacttgtactccccactgtcagtttcctccaggtctcggatctccaggcgcagggagttgggaccagaggtaccactgaagcgtgggctgtgatcactgtccccggaggtggaggccaggatatgacccccatgtgacagcaccagtgtggccaggggctcactgaccacagagcagtgaaggatgcccacaagtcccgcctgggtctccaggaaggctgtcaggactggagtgagaggcgggtctgtgtggagacgagaggtgggcctgtcaccctcagacaagggcattccctggataccctgatacaacccgtgacctctgcaccgctttgtcccacactgccctgtgagaagggggtgatcccaaagtgcctgagtgcctgctgaatacacttttgtccttggctgggctgggtacgtcactctgttgtcccagtcagtgttcaaggccaccctgcaagtggggataaaagccccacttcaaagatgagaaaactaatagagagacctggtgagggacagcacctcagccaggtgaccaaagtgagcatcatcagcaatgggacaagctgacacagagtgcctcctgacagggcagagcagcatgtccgcggccttcccacccagagggcatggtctcaggccattcaagtcaggcaaatgtggagtgagggacctcctcagaacagcaggcctgcactctgcaagtttcaatgtcaagaatgacaaggaaagactgaggaacagtctcagactaacggagaatgaagagacgcaacgacccaatgcaatatgtgaactgtgattgtattctggaccagaaaaaaaatggctacaaaagacagtattaggtccactggtaaaatgtgaatatagattatagcttagataacagtcttctatcagccaggtgtagtggctcatacctgtaatcccagtactttgggaggccgaggtaggtggatcacgtgaggtcaggagttcaagaccatcctggccaacatggtgaaaccctgtctctacaaaaacacaaaaattagccaggcaggatggtgggtgcctgtaatcccagctactcaggaggctgaggcaggaggagaatcgcttgagccccagaggcggacattgcagtgagccaagatagcaccattgcactccagcctgggcaacacagtgagactccatctcaaaaaaaaaaaaaagtcttctatcaatgctaattttcctgatcatgatcattgcattgtggatatgtaagagaatgatcttaggaatttagcggtaaagaagcctcatgtctgcaacttcaggaatataaatatgtaggtagatacataaataacatatgcatatgtatatagagtgtccatatatgtataagtgcacatgtccacatagagtggatgtgcatacacacaagtgcacctgtatatatgcaagtctatatccatacatttatatgtatgtatgtgcgtgtgtgtgtctgtgtagacagcgagaaagattaagcaaatgtgccaaaatgttaataaatgggaaatctaggttaaaggtatataatcattatttgtctttctctgcaacttttcataagtttaaacttccaaatataaaataggagggaactagggaggtcaaagcattgcccaggtgtgcagagctgggacatgagctcaaggccacctccaggtaagtggccttgaagttcccatgcccaggaccccaacccttccttggggctccaccatctggtcctgctctgactgtgtccagtgccaccccaccctggcctcttacggttgactaccacgctgacagggcccgagcgctcgctgccatggacgttctgcacctcacagaagtagaagccagtatcagccctagtggccaagtgcagccggagggtatgggagtgggcatcctccagcaggacatggttcttgtaccagctgtagcggagatcactgggtgcctcattgggtgtgttgcagactagtgtcactgtctggttctccaggatgggacctgctgggctcacctggacctcagccactgcaagggcagcatagggagtgctggggggtcccagccaacttccagccccagccccatacagtccccgggtctcagccaatcagcctcaatctctgcacatcctacaccacccgcctgctgctacaggggagcctcctggagtgctctgcatctctttgtcctgctcaccaggatccccctgacaccccacccttcgtgggggtattgtcacctgtctcatggtaaggcagggctgggactccacacctgcatccaggaagcactgggttatgccagttgctggccctgccctgccctgtctcccctccgtccctgaggcctgagctcctccctattctctggccaatacgcaaccttcccaagaactcactgaagatgtggaggctgatggggggtgagaccaaagagcccacgccgttctcagcttggcaggtgtagacgccagcatcgctccaggctgcctggggcaggtgcagcacaccagtcttggtttggaggcgtaccccatccttgagccacttaatggaactgactgcagggtagctgctgttcacctggcaggtgagtgtgaccagctcacctggaaggatgttcctccccgaggggctgaggaggatcttcacacccttgggggcatctgcaagtcacagtagggggtattgggtaaggtgcttggggagggcagaggatggcacacttcttcttgcccccctttaaaagctcagtcctaaggaagtatgcccagataaaacagcagtccccttcaatcctcacccagggcatgctctgtctgcccatgtccgtccctttcccgccccctgcgcctgatgcattcctatgcccattgagagctgatcatgtgacgcttggccagcgtccagcctaccccaccagctgtagttttctgcttcccaatgctgtccattgctcctgctctatttgggatgagctccacacacagggtcatgggtaccccactgctagctttagtggcctgtggaagctattggtaagggaccaactacctagtgggagggggccaaaggcagcatcaaactagctctgaaaatagttacccagtttgtaagcaagaggccaacaacacaaagaactgcatttccttaaatcttgttccaaagcctctctctgtgtattcaagtgttttattcttatttttttagaaagaggatctggctcagtcagccaagctggagtgcagaggcacaatcatagctcactgcagcctgaaactcctgggctcaagtgatcctcctgcctcagcctcccgaggaactgggactacaggtgcaagccaccacatccagctaatttttgttttttaatttttttgtagagacagggtctcactatgttgcccaggctggtctcgaactccttgcctcaagcaattctcctgccttggcctcccaaagcactggggttacaggtgtgagccactgtatccggcctcaagtgtttaatatgtgccaggcactcttctaaatccttgacctgggtcatctcctttatttgtttttgttgttgttgttgttttttgtttgagacacagtctcactctgtcacccaggctggagtgcagtggcacaatcacaactcaatacaactccacccccggggttcaagcaatcctagtgcctcagcctccttagtaactgggattacaggcatatgccaccacacccggctaatttttgtatttttagtagagacgaggtttcaccatgttggccaagctggtcttgaatccctggcctcaagtgatccacccgcctcagcctcccaaagtgatgggattacaggcataagccaccgcgcccggcccatctcctttaatttttatcataaatctgtgagacaggaaccatctattgttatcttcgtcatagactgagaaaacagagccaggcaggaaagggataaatcccacctccccagcatcctccagcacggggtaaatcccggggcacttgctgccaaccctgaagctgcatgggagctcctgttccccaaccctttgtgtctccctttctctgcccagcctggcctcaaggacaagccccttcgaagcagtaggaggtggagggaaccatttaacgaagtccttggggctcagcagtgtctctccacttgccctaccctggaggcccaggagcagcctggttttgcatcaggagcaagggttccgtttctgtgggctggagaggggctggtttctgtcaggagcaacagatgcgctcagccacaagggtgtgtccccagacaactcacacttcacttggaggtgaatctcgctctgagccctgtgattggccacggagagctggcagcgcaggatccggccgtggtcctgccaggacatggccatgtggagggtctccaggtggccgacgccggtgggctcaaacttctggctgttgaaggtgacagagcgagcagggtcctggccttgccactgcagtctgacctgctcctgcaggcatacgtagggagtggagcagttgaagtccacctctgtgccctcgagaagctccaccggggaggcaatggtgggcaccctgggctcctctgaggacagagacagcagtgctcaggacccgcttttgccacccctgagatccctcgccctggaaaccccagctgaggagagagccctggggagggggcttttaggggaaggaaagacgctttctactccagccccacttgggtgaatacaagggagaaccaggcctgggcctacgccggggctggaacagaggctgagactggctggggttagattcaggacaagggctggggctgagagccaaggggtccagaagcagcttgggaatccctcccggggggcagccaggccaccccacttatcacctgttactgtgaccaaggtgcctttcacatctgaccagcggttgacctcactgatctcgaagcggaagttgtaggaaccagagtcctcg

SEQ ID NO: 243 - DNA, 7414 bp, Homo sapiens
ttgcgtcataggatggagttttattgggaggacattctggacgggctcccagcaagagtctggcaatggagcatgaaaatgaatgagcctggaatgagggagggtgcggcctcggctacacaaagttcacccgcccccaactgcctcccagcgtgttagctcctgtggcaactccccacttctctctctgtttttcaacccaaatcctagagcagagggctcttcgctcctcacaccatctccaccaggctgcagggggagtcactagcccactcaagagctctctcctgttggtccctgattcgcaggggcacgtcattccttcttggtaactcattctctttaacagcccgacacagggtctccaggaaaaggacaggagctcacacagtcatgaacagagatgcatctggagcaggaataaggatgctgacaacatctgtgtctgccctccactcttgtaagggccagtaaggtagtacccagtccctgggggtagggggggtggtggtgggaatgagggcatctcttctttcaggggccaaatctggcacaaggatgtctgcttaggcaactccactgcctggcatgctctctccctaggaaaacaccaaaccttttttatttcctcagtcttagtgtgagagtgatcacctcttccaggaagcccacaaccagaatggccaggggcacaccctggccctcagtagatgggcactgagacaaaacatggcctgctggtggcattcccaacaatgtcaaaagtctcagggatgagctcacagttgggagtcctttggaagtccaattccaaatgtcctctggactcaaaataaaaactacatttcccagtctcccttgtagcttgcagtagccatgtgacaatactccagccaatgggaagtgagtggaaaagtcctgtgcagcttctgagttgcgtccaccatgggcatgggtgtgcttctacctccactcttccttcttctggctggagggcatgtggacaaagcggggccatggtgagcctcacaatcaaaggcatcattttagggatagagaaaaggaagatagaaggatcctgagccccaacatcataaaccatcgtaacagccagactagcgtgggagagaaaaataaaattctatcatgttgaagtcactgtatttggtctcttgttagagcaggctgactgatactctgttgaatacagaatgccttggtgagcctctgaggatgcaggatgctgcaatccaaccaaagtccagggtgactttcgaggagaaggatgtgaaagggcagggcttcctttgagggagaaatggagagaagggaggagatccagagaagagagagcgagatcagctcagtgctcttcagtgtcctccagggtcaacaccctcctgggcagacctctcaccacccatttttgggggggcaagaggcttggggccaggtcataaaaagtcagatgtcacagagctgttttcgtagaggcgggcaggactcaacactgcctcattcacattcataggctggagtcatcacagattctggccactttctcctccggagggcaggcaacaccactggtcagcccaggggtggggcacaggttgaggtctcacatgtggctgcatcaggatcaatgagcttcccacagagaaaaccctggtcacaggaggcctctgggagccagggcaggcccccaggcccccagcctcaggtggggtcccaagaggattggtgggagtgtgcatggctggaagtgtgacttggagccctggcctaccaggtgaatcagctgcagaagggacacaccacaggggaggagaaactgactttcacttctgcccaggtgacgggcaggcttgggagtggggaagaggcctcagaacaaaggtgggggagtcagaacatacgtgtcttggaaatggaggggatgctgccaagtccagaaagtctcccctagtcctctaagccagccgccagctgacacagggattccctctgccccgagcagaacagggctctcctatctcctgaggggctcctggttccctgcacactctccccaacctccccttggtcccaggcaccatcctctaaatgacagcagtctccagatgccagttggcactgtgggttagctgggtattatatctgcccgtgtgtgttgaatggatacctgcgtggtctctttctgaaaagccatctccaccgaattctcgcccatgctctgcttacaaacacgcctccttctgcaaggcccggagtggactcagagagcctctcccctccccacctcctgcccccattcctctcccgctccccacaggctggctccagaccacaagagcgtgggaacctcatggagagtgggtgcttcctctgtcttcctccctagcccttgctttagcacagccagggcagagaggaggaaagaaggaaactacagcaaggaggatttagggacaattctagaagggatttccaatttggaggggcagtctgggaagtaggcagcctgtgaacttaataggaggtcctaaaggacctgggggaatttggggagaagacgaggtgggctgccttaccccaatcttctggcccactcccagctccagacccacctccaggtgtagcaggcccccaggcccaacagcaggagcaggaggcccaccagcagtcccaggacccagagcagctgctggaactgatgcaggcggtgcagggctggaacacagagcgggactcagagcagccacagctgcaggcccccagtgcttccttccaaggggacccacccaagatgacaccttctaacttttgctttatcgctgaagctctccacacaagggtgccccgagcaatcagtttagagtcgacaggcaaatcatgctgcagcaggagggatacagggaaggaagcctttgggcctaagagctgggcttttgtgcagagtggcctgggagatggagccccctcccctcacctctgaccccaaagtaggtggaggtagaggcagagcccaggacatttgaggcagaacagatgtattccccttggtcgctgggcctcagcgcctcgatgtccaccctcagggcattgggggaagccaggacatggatgtgtggctctgcaggagcaccctggggctgactggaggccaccagtcgactgccaaggtggagagtcaggctggcgagcggctcgctgtccactcggcaatccaggatgccccggaggccaccctcaggctccacgaagaccatcatggtgggcgtcttgggagggtctgtggggaggaagggagtgtggtgattgcagacaatgaccacaaatttctccctccctgtacccatgcacagtgactttgctgctcctcccattaagaggcagaacctatttcctcactccttgaatctgtgactcagtttgaccaattgaagaaagaagtgatgttgtgcaacttcagagccagacctcaagaggccttgtagcttctgctctacttgttggaacacaacaatgtgggaagcccaggccagcctgctgggcacatgtggcccaactggcagccaggagcgtgcagtcatctgagaccactgggcaactgcagccacatgaggtgtgaacaacagaagaactccccagctgagcccagcccacagaattgagcagataacatgacttttgtttgaagcagtaagttttgttgtggtcaatagcaatagctgactgatacagtgtaggccttggtgaaggctggagtgggagaccaagactgatgagggcttatcgtgtgccagacacactcagcacgctttatttcttttggttttttctcttcttttcttttcttttttttttttttttcttgagacagagtctcagtctgtcacccaggctggagtgcgttgtggtgatcttggctcactgcaacctccacctcccaggctcaagtgagtctcctgcctcagcctcctgaatagctgggattacaggtgtgtgccttcatgccgtgctaattcttgtatttttagtagagacggagtttcgccatattgaccaggctagtcttgaactcctgacctcaagtgatccgcccacctcagcctctcaaagtgctgggattacaggcataagcccctgcaccagccatttatttcttatacaacttgcaggatgaggcgaatgatgtattccccattttacaaggtcacccaaccagacagcgggagagccaggattccaacccaggactcaatatccgtgaagccttcactcttggcagacagaagaggaggaagaactgaggtgggcgtgtgagatgtggggagactaaggcggaggagggggttcacactcacagagcacacggagcatgactggagcagaggcagcagccccagtggggagctcagccaggcagtggtacatcccagcttgagcacgagccacgtgggtgaaggcgagagtgggcacaggctccgcgtgcagccgccggtcattccagaaccatgcaaaggtggagttgcccacaggcccagggccacccaggaggcggcagctgaggttcagggcagcgccctcaggcacgtccaggccaggctctgccaccacgcgtgcacctgcgggcggaggatagagagatgattggggatctgtaggccttgggggctggagcctctgggtgggacctctgaggggcctctgcacattgtgggaaggtctcagtctgacttggtatagggctttccaaggtggaaccatgccccctccagtgggagctgtgccccctccaccagattaggcttctcaaggcagagctttctcagaccagacagcccgctctagtgggagctccagcccctctcgtggacttggacctgagagcatcagagcccctcctcctcccctctcttccactcaccttctacctgcaaccgcccgatggtgctgattgagcccagcaagttttgggctgtgcaaacataggtgtcatcacctgcaggcacatcttgcacctgcagccgtagggcgtttcgggccacctggacatggcctgtccctgatgccaagctgtggaccccgctgctcgtggccagcaccttgccatcatgagatagggccagctcagcaggtggctcactgtccacagtgcactgtatcacagccatggatctggccctggagtcccggaaggaggacaggacagcgtcctgaggggcatctgtgggcaggcagggcacagatggggaccttgcttaggcaccctgtactgctcattgcctagctgcctggggttggtcaggctgaggcctctggaccaatggccacttcctagaagtgacaccttcccaggagtcctgtgggcagagtgctccaggcagggcttataggactgtctctttctctagcacctatgtcctctttccccaactgcccattcctgggcccactgcagtcctttgcccactcccaccagagcccagaagcaccctccaccaccctcctcctgggcagccctggccaaggaccctctgctcacagaggacttgcagggcagcaggacgggagctgcgggtgccctgggcatcctgggcctggcaagagtaggcgcctgcatgagcccgcgtggccaccaggaatgagagtgaggcagctggaccctcctgcagccaacgaccgttgtggtaccaagtatagagtgtgggtgcgtgggcagcagggtccgcacaggtcactgtgatgggggcaccttcaggcacggcagcctccggagccaggatcacccgcacacctgtgccaaggaggccaggatcagccgggcccagccggacaccacagtgggcttccatcccagtgggcttggcctaggccctgccttaccctccagccgcagctccagggacgtgttggcctggcccagagggctgcgggcagagcagctgtagaaaccctcatccctgggctgtggccctcgcagctccaggcgcagggtgttggggacagaggctgctgtcgaggaggccaagaggcgaccggcgtggctgagggccagctgggcgggcgggcggctgtccacagtgcacagtaccagggccagctgcccgccatggctctccaggaggtaggtcaggcgcaggttgcggggcgcgtctgcagggcatgagaggcttacacggagtcacaggcagcagcctgcaggaggccagtttgcaggtggcattcaaactcaggagggccctggctccccacccctatggctcccaaccacccagtctgaggcactgctcctctgcccagacaggactcaccccagcgccccctactcttaatgctccttgcccagtgctccactagctactgggtaccgagttccccactggacacctgtcgggttccggccatgccgtgatccctgtgggcttctgtcattcctgtgagtcccaccctgcatccagccagactcacagaggacgtccaaggtgataggtctggagaggcggggtgcccgaccaggggggcccacaccgcagcggtaggaggtggcatccctgactgtgacgttgggcagggggatggagtgggcatccaggcgctgctgcccatcctggtaccatgtgtaggtgagctgggccgggtgagtggtccacacaaggcaggtcaggttcaccagctgcccctcccgcacggtagccccgggccacacctgcacattcacagctggggagagggagggcacaggacaccagtgagggtcttgaggctgtgtacagcaggccacctgtctccatgtgggtgagctactcctactgctggggagccccttggcctttgggagccttgggtggcccacctataaatgtggcttagaagtcaagcttgggaatagcccactggctcctgagtggtcccaagtagagttccacagagtcctggaaagccctgagcccctccctgaccctggctgggggcaaatggggagaccacagacctcccctcccctgctgcactttctcctgaaattccctgtttagttttatccactgggcatacttgtaaaatttggtgtttataaaaggttctcctaagaaactcaagtctggagtccaccatcgttaggaagggtgggaatggggactattcccgtgcccccaggcttctagaaccctgtcccacctcctctcctcttttaaaggacacacacacacacacacacacacacacacacacacacacactgaccttgagcgtcgaagtcagctgaggccgaggcctggcccagggtgttggaggcctcacagatatagacaccctcatcctccagcatagccccgtggatctccagacgcagtgtgttgggggccacagccacatgcagcctgggagagctgccttcgggtccccc

SEQ ID NO: 244 - DNA, 390 bp, Homo sapiens
gcggccgcggaagcgggcctccaccagcttggggtccgccgagtggctcaccacctgccgctggcccgagtagtcgtagtaccagatggccgtgatgccgtcgggcacctccacgtcggcagggaagctgaagatgcaggggataagcaggcaagaccccttcacaccctgcacgtcctggggactggagacgccccatgaggcctggcctgggggaagaacggcagggggacagaggggagggtgatacaggcctcagggtgccacagagccctgcgacctgccccagagaaggtgccccagctgggctcccaaattctgccctgccccgagaaatgcacacttagagcagcccttctcagtgccccaggggtcagtccactgcccgag

SEQ ID NO: 245 - DNA, 19315 bp, Homo sapiens
  misc_feature (16884): n equals a,t,g, or c
cctaccaggttcaagcaactctgctgcctcagcctcccaagtagctgggattacaggtgcatgccactacacctggctttttgtatttttagtagagatggttttcactatgttggccaggctgatcttgaattcctggcctgaagtaatctgcctgcctcagcctcccaaagtgctgggattataggagccaccacacctggcataactggtattttttatatgcttcctgggcaacttaaaaaattgattactctgttgtttcttcctttttttttttttttggctttgcaccaatttgtgagacccaagtatctcctacctagaaaaaaaacacactaaacagtaaatgattaccaacctatttggaacaaatctcaattaattaacatatacttcaaggagaagacttaacaaaatcttacttttcattcttaatagctctttccataaaaatgttccacaagtgtatcaaattagtcctaacaactactgttaagtgattaatgaaacaggagtgacaggagtgaatttaataatagcaataaatacagatgggactacataaattgtggaggtcctgatgcaaaactctctctgtattcgatggcatctcagctttctcatctgaaatgaatgaagaaattaataataatgatgctcatagcaataagaaaaaaattcaaaacaaaacccatactctctgacaacatgcctttgttcttattacctactacccacttcacatatgctagaagcgctaaacaaagctgcaaagagaaggcagtatggggatgaatgtggttcctggccttgttgtaaagcagtatggaccagtgacttcctccagagcatttgcattgtgtggcaataaaatgcagttgcacaaacattgggcaaactcacttaaagagggagcaggcttaggactaaaggtgttctctattctaggcaacttttcaacctgtcttcctctaaagtggaggcagattttcctccaccttctattctcctttgaaccccttccccttccagcacctcccatctctggagtttgtctagagtgatgcatatcactgctattcatctgcttatttaaaaagcactggtcccggcctagagtacttacagagctgtttcactgtgagggtctttatccttcatgcagagctaaaagcaaacatggcagtaaattagcctgctttttaaggcccatggagaaatattttgaatgcattaagatggctcgaggacaggtgtgtgtcctgtgcacacctctgcactggctcaggcgtcatttttggggccacactagtagtttttattaaactcaaagaagatgtaactcttagttaagatgcttccagtgtcttagatacttgagtatttacttttttatagaaaaaaaaatgcggccgagtgcagtggctcacacctgtaatcccagaactttgggaggccaaggcagatggatcatttgaggtcaggatttcaagaccagcctggccaacatggtgaaaccctgtctctactaaaaatacaaaaaaacagccaggcatggtgccacatgcctgtagtcccagttactctggaggctgaggcaggagaatggtgtgaacctgggaggtggagcttgcagtgagctgagatcacgccactgcactccagccagggtgacagagcaagaatccatctcaaaaaaaaaaaagaaaaaaatgctttgtggctgggtgtggtggctcatgcctgtaatcctagtgctttgggaggctgaggcaggcagatcacttgagctcaggagttcgagaccagcctgggcaacatggcaaaaccctgtctacaaaaaatacagaaattagccgggcacggtggtgcatgcctgtggtcccagctactagggaggctgaggtgggaggatcacttgagcccaggaggttgaggctacagtgagctgtgatcaaggcactgcactccagcctgggagagagagtaaaactctatctcaaaaaaataaaaaaagaaagaaaggaagacagaaagaaagaaagaaaagaaacaacaacaactaaaatatgcttgggattggaatagggggtggagtgaatttcttcttgagagacatggctgccctgttgctatgtgttccaaggagaatgccccttgctgaatgatgaactcagcctagggctttctgccttttttgctctcctttggcactgaattagctggcagagtcaaatgcatggcattaacctaagcatgcacgtattctgaatcataccaaccaacgaggataaccactttataattcaaacaccagtccactacagccagggcatgtggctatagtccagaagtgagcagccaatgccatcttttccatgcagatctctgaatctagagcggatgttcctccctatatttatttattataccacaggtatcatagcaacaataaagggcaatttaaaaggaggaaaatcagcccccaattgcctacccctggcaacacagctattttcaattcaggctttgccatgtgcacttctcttctttgtaaatctgtactcataatgtacatataatttttattcccttgagcaactgtattttagatctcatggtataaagaccagatttgactttgccaagaagggttcctaactgaagtcacttatatttctagctttctgcctttattcagatgatggctttttacttaaatagctcagaatacttagataccttcattattttctttcttctagcaatcagtccaaagcacaatgctgagagatcccctcataatttccccaaagcgtaaccatgtgtgaataaattttgagctagtagggttgcagccacgagtaagtcttcccttgttattgtgtagccagaatgccgcaaaacttccatgcctaagcgaactgttgagagtacgtttcgatttctgactgtgttagcctggaagtgcttgtcccaaccttgtttctgagcatgaacgcccgcaagccaacatgttagttgaagcatcagggcgattagcagcatgatatcaaaacgctctgagctgctcgttcggctatggcgtaggcctagtccgtaggcaggacttttcaagtctcggaaggtttcttcaatctgcattcgcttcgaatagatattaacaagttgtttgggtgttcgaatttcaacaggtaagttagttgctagaacccatggctcctttgccgacgctgagtagattttaggtgacgggtggtgacaatgagtccgtgtcgagcgctgattttttcggcctttagagcgagatttatacaatagaatttggcatgagattggattgcttttagtcagcctcttatagcctaaagtctttgagtgactagatgacatatcatgtaagttgctgataggtttccagttttccgctcctaggtctgcatattgtacttttcctcttactcgacttaaccagtaccaacccagcttctcaacggatttataccatggcactttaaagccagcatcactgacaatgagcggtgtggtgttactcggtagaatgctcgcaaggtcggctagaaattggtcatgagctttctttgaacattgctctgaaagcgggaacgctttctcataaagagtaacagaacgaccgtgtagtgcgactgaagctcgcaataccataagtcgtttttgctcacgaatatcagaccagtcaacaagtacaatgggcatcgtattgcccgaacagataaagctagcatgccaacggtatacagcgagtcgctctttgtggaggtgacgattacctaacaatcggtcgattcgtttgatgttatgttttgttctcgctttggttggcaggttacggccaagttcggtaagagtgagagttttacagtcaagtaatgcgtggcaagccaacgttaagctgttgagtcgttttaagtgtaattcggggcagaattggtaaagagagtcgtgtaaaatatcgagttcgcacatcttgttgtctgattattgatttttcgcgaaaccatttgatcatatgacaagatgtgtatccaccttaacttaatgatttttaccaaaatcattaggggattcatcagagcacaatgtcagaaagatcacaacacatgcagcaataatgggctctattggtacacccacagttttatctgtaggaaatgcaaacacagggaataagaatgaacatttatatacttccaatacgtcccagcaatggtgccttgaactttatgtgtgtcatccccttaattaaaccttctcaacaatctcaaaaagtaggtatgattgtcctcatttcacaggtgaggaaccaggaggtttgaggggttagagtgcttgttcaaagtcatagaactaggccgggtgcagtggctcatgcctggaatcccagcactttggaaggctgaggcgggcagatcacttgacgtcaggagttcaagaccagcctggcccacatggtgaaaccccatctgtaaaaaaaaaagaaaaaaaaaaaaatatatatatatatatagctgggcatggtggcaagtgcctgtagtcccagctacttgggagactgaggcaggagaattgcttggtcccaggagacagaggttgcagtgagccagggtcgcgctactgcactccagtctgggtgacagagcaagactctctctgtctccaaaaaaaaaaaaaaaaaaaaaagtcacagaactggtaaatggtagaggcaggttttgaatcaattcctttgtggaataataatttattgtaatatgagtaactcccctaaaacaagtagaccattttgtgctccttcacccacagttttgccacacacagagcagaagtagattgaagtcaacgattttgcctggattttgaaaagtccaaaatatattgggaagtatcctggggtgggtgagggaagagagggaggaaggctttgagagcaagaagagaaagggtggagagctttctggactaagaaggagagagaggtctgtgggcctcaaaagcagtggggagccttgtacctgtactgcaatggtgccccaagcaggtgacaagacattatagaaggtaggtggctgcatagtgtctctagggaagtaggactctaagcatgagccttcccaaccttggcaaagttttctgcatctctctaaatgccatgcaaagagagagagcctacttctaacttggactaggaagagatcagcagcaaccatgacagcttggaagtgaaagcctacccctttattttctaaacaccaggtcaactgagagctatttttttttttttgagacggagttttgctcctgttgcccaggctggagtacggtggtgcaatctcggctcactgcaatctctgcctcccaggttcaagtaattctcctgcctcagcctcccgagtagctgcaattacaggcacgtgctaccataccgagataatttttgtatttttagtagagacggggtttcactgtgttagccaggatggtctcaatctcctgaccttgtgatccgccttccttggcctccctaagtgcttggattacaggtatgagccaccgcaccgggccaagagctactttatttatcagtcactataggcatagtgcctgtgtttgcaagctttctaagagcctttgaaaatatttgagacccagaaaaaaatgattggccccaagatatgaaaagaaagtagcaaaattaatcaaaattaatcaatgtttaagcatctgtaaaatgcaacctggcatcaactctaaccgaactgttaaataataatgtttaaacctcaagaaccaaatgagtaacttatttataacaaaattcaaaatctatacaagttataaaaattctttcaaaaattttatagcagaaagcacatacaatgtgctttgctttaatatctttgatatgatatggaatgaaactctcaaaagtaaaagtgaaagccaggcagcgtggcatatccgtagtcccagacacttgggaggctggggcaggaggattgcttaagcccaggagttcagggctatagcaccctatgattgcacctatcaatagccactgctctctaccctaggcaacatagtgagaccctttttttcttttttaagacagaatctcgctctgccgcccaggctggagtgcagtggcttgatctcggctcactgcaacctctgtctcctgggttcaagcgattctcctgtctcagcctcccaagtagctggtactacaggtgtacaccaccatgcccagataatttttgtattttaggtagagacagtgtttcgccatgttggccagtctggcctcgaactcctgacattaagtgatctgcctgccttggcctcctaaagtgctgggattataggtgtgagccaccatgcctggccaacccctttttttttttttttagagatggagcctgggtatgttgcccaggctggtcttgaactcctgaccacaagcaattctcctacctgggcctcccaaagtgttgcaattacaggcatcagccactgcacctggcaggaccccgtttcttaaaaaagtaacaaagtaaaagtgcttcagttcaacaaaggttttaaagtgaccttgtctaagcccctggattctgatgccatccaacgacgggaaggagcttcagtcatggcttaagtaacattttaggcatttaaaggaaattgagcatgtgctatttatcgcacaattgagtttatggattgaggtgcagtcaacaaatatttactgagtgactaatgtgtgttatgcactgtgttcagcactgcaaaaaataggacaggtgtagaaggctcctctgccttcgtggagctcatcttctagtgagggagacagacattaaacaaacagacactacagattaagtattagaaaggaaacagggtcatgagttagcaagtgaagggcaaaaaccagggaagaggggaagaagtgactttaggtaaatttaatttcaaagcccaatccctatataccttaagattatgaaatagggtttatctcccctgtccccataactgtataacacactaaccagttattattataattatttttggagacagggtctcactctgtcactcagactggagtgcagtggcatgatcatggctcactgcagcgtcgacctctagggcttaagagatcctcctacttcagcctcctgagtagtcaagactaccagtgcgtgccaccacacccagttaattttttgatttgatgtagagacagggttccaatatgttgcccaggctgttttggaactcctgggctcaagcaaccctcccgctcggtctcccaaagtcctgggattacaagcatgaaccatcccacccagcctgtaactacctttttatcatttcctgctctggataattttgggaaataaatggattaaatttttgccctctcttagctgtttctaaaaattattctcatgaaggtatgggtcatatcacccctatggagaaactttgctcagggagcctttttctagtaagccctggttctgtactagccagctctgggacacaccaaaggcccgtcaaccttactggggagcccctctatttgcaagatatcaaaacaaaggggaagtaaaggtgggacaataagaaaaagaaatcagaattcagtcacaggttggaatatttttaccaagccagataaaatgaagccacatgtgacagctcttactctatttttttatttttatttatttattttttgagacagagtttcactcttgttgcccaggctggagcgcagtgctgcgatctcggctcactgcaacctctgccttctggtttcaagcaattctcctgcctcagcctcccaggtagctgggattacaggtggctaccatcatgcccggctaattttttttgtatttttagtagagacgggtttcaccatattggtcaggctggtctcaaaccgctgacctcctgatccacccgcctcggcctcccaaaatgctgggattacaggcgtgagccgctgcacctggctgacagctcttattctatacacaaaccgaagtaaactaccttacccattggcttgctttggattccaaatttctgttgaaagtgactttggtcggggcatggtggttcatgcctgtaaccccagcactttgggaagctgaggtggcagattgcttgagcccaggaattcaagaccagcctgatccacatggcaagacctcctctctacaaaaacaatttttttgattagctggttctgatggcacgcacctgtcccagctattcaggaggctgaagtggaaagatcgcttgagcctggggggatgaggctgcagtgaactatgattacgctactgcactccagcctgggtggcagagcgagaccctgtctccaaaaaaataaaagaaaaagaaagaaaaaagagactttggcaagggtaattacataactgcccctctccccttgtcctgttttatggtctcatttgtaaccagacctgatatttccctcctatattcatcatggttaaataatcccaacacatgggctaaatcttgtgctcaagaaaagatctgtgatgtcgtttgtagctttgcatggcctcatttaggtacttcctcactgagccgtgaagccaggtgagggctcatgaaaatcttggcatttagcccaagccccagcagcagagcatttatgccaccagccgtgggaagtagctaagcaagaagaaataagaaaaacaagttggtttggaagagccccacccaaaacaagtttctgcccacctgaaagccaatttgctaagctagcatcctgattgccacataagctgtacttttttttaatgtgacacagagcaattatgatttcttcttaaccaggagggatataattccctggcctgcaagtgtggtgttcatagtcaggatggcagggcatgaggcccacccttccatgcttttgtggtcttgggggaggtaaataaccacaaagctttttcactgcttctatctcatgggtattcaggatatttgtgggtttggtttttaaaacaagtagcccctgagcaattgttagtgctccgcaggacgaattactgatcattccaggaatcacagtgatgggcattcaaccaccagtaagtcttcttccccactagccactcttttcatatcccataactcttcccctcaaggggaagcaaataagatgtcctatggttacatcaccacaacacttctggcaggggttcagctggcttcctggtgactgacaagactggcaataagtgagtacagggaggcaaatgacaaagtgagtaatgttctaacaagatatgggagtctcagcttgttgggctgctcctggtgtgctagcatgagagcagaccatgtgtgaatgagcatttttggcatctgctaccccaggtattttgcctttctctttttgtatgagcaagaaatatgaggagggaaaaccccacagagcatcatttgttctgtcattgtagaggtgataaccctgggtagatgaagcatgaatccaagagaaagggcttttttgtccccttattttttcctactctctctgctgattaccctacaggttagaatttgagttaggagtgattgtagggatccattttcttatctagtcctaatatctcttctctgtgtgttttttacttctgttagttatgaagctgtgaactcaaaagtccagttgctacacacattgttgcccaggagaattcatggaaatactcttccctaaaagccaagcaggattgtttcctatatttggttctaagaaaggattcttgctcaaaaaacagtgtcctgtatggaatgggcatgatttccctgaaaggatggactaggattcttagtggaaaaatccttggatggggatgattctccaaagaaaatcctggccctaatcataaccgttattatcatttattgtcaccagaaatattcactgagcatctggtgtgagttttgcactgtgctgggtattacttaaaaagagcattacctttaacaatcaggtgaaagtccaagctctccgttttcagagatgactttgcaatacaactgtaggttccgttgtcaggcttctcgactttggtgattgacagctgaaaagactcacttgtctgttggatttggtgacggcttttctctaaatcgaggagactactgtttttgtaccacatcatttgagcctgggggttggctttcacattgcaaaccaacttcacattactgccttcctcaactgtttggaagtcgttccacttaggagaggaggaactgcaagactcaagcatttagatttaattagcagataagcaatagttcactgtcagagttcaaagtcttccttcaatctatctcatgtggtcatttattcatttgacaaaaatttattacatacgtacggtgtgccaagcactggggtaaccagggcaaataacacttccagttccaaatctcaacgaacttttcatgtgatgaagaagacaaaccctacaaacaatacgtgattacgagaatactctatatagtactgctctatgacaagcagacaatttgtaacactacccaagagtataagccttgagtcttcttctctgagaataataaaccaacctgtgctagtgtgcacaaaacagtacaaaattaagaagacatacattgcaattagatctaattccatctacaccgtttactgtgactttgagacagttaactaactgctaaggcctctgtttctcatgtaaaaaaaaaatgggataatcatacatctcctgagatgctgtaaagattaaataaaataatccctgtaaagaatttgccacagtgctagccgctattattattacggtggtggtggttttgagggttactctcaccgtctgtttttgcattttatcgaaccattgccttggtaacatattcaccaatgcatctttgcgttttctcagtggtgctctagaaataatgtcctcctcccagaaggtgttctaagcatgagaactctggcatctgtggaaggcaagtgagtccctctcatccctgtgtgtgagcaactccttttttcctctacaataagggcagttgtagacccatagacagtcaacacatctatcactgtgcatattctggcagaagtgcagaatagtaatgaaatggttggagagtgggaactaggaaaaagatagagacggagaaggaggaaaaaggagcttgtataatctgcacactgaataattagaccctgagtaggctgtgttattaataactctctcagaagaatgacattttgttgctctttggaatgagctcgaattctgtatcatatccaacaaggatgttatatggtattcagataggaaggaagctgctggaatagagaacataattgccaaatggaacaattccatttgtggacagattctgttagtgatttctttctatttaactatttgaaattaatttaagcatatcagtatatgtgaatatcccctctgtaaaaattagtacattttagataaagctaagatccaagctggtcacttcctgatccccagagatacccactgttatgagtttggtgtaaatccttccctatctttcttttttcttaaatagttttctatacatatagtgtacccataggaaatatatcatattattttagggacatgggaaggttttacataaaatacttcctttctctcagtaacttgcatgtttttgagatatgtttatattgaaccacagagatctagcttattgcttttagaatgctatagtataatgtatgcctttaatcatttgtgttttgatgggctttaggttgttttcattttaaaatgttaaacaatgctacaataaacatccttgtacatatctctttatgatcctgtacatgtatttctccaacgttaacatctagaaggagaaatggtgtgtcgtaagatatgcacactttaaattttgataagtattttgaaagaggtgttctcaatttaaactttcagcaacgaggtatgagaggacctgtttctccacattctcccccaaacagtgtattatcaagcttccatttagttcttgattctgctatttataacaataatggtcctgcctttgaagggtacataatatccttgtcacattttatgagctcattttgatttattggttgatgactttgtgtcagtactgtcattatggattactgagcaattaactatacacacacacacacacacacacacacacacacacttagcaacaatgatatttaggagattgttataaacagaatttaaacagtggattgaggctagaaaactgaaaacaatttctttaagtcatcaaatcacattgttggcatttctgccatgtctcccttaagagggttccatcagcctgggcaacatagcaaaaccccgtctctacaaaaaatacaaaaatcagctcggcctggtggtgcacgcctgtagtcccagctacttggaaggctgaggcaggcagatcacttgagcctgggaggcagaggttatagtgagctgagattgtgccactgcactccagtgtaggtgacagagtgagaccctgtctcaaaaaaaaaaaaagtttcgtggaataagcacttaagcactaggttagaagcttgggaattagtgttttattctcagctgcacctatgatttgagcccctagtccgggccttagtttccttagctgtctttttattttattttattttattttattttttttgagacagggtctcactctgttgcccaggttgaaatgcagtggcgcaatcacagctcgctgaagcctcaaacttctgggctcagaagatcctgtagcctcagcctcccgagcagctggggctacagatgtgtgccaccatgcccagctaattaaaaacacaccttatttttttttttggtagaaatagggtctcactatgttatgtttgtagagatagggtctttctaccaaatcatactgcatcattatacctcacccattgccataccatccacaccattctcatgcagaaccagcttttcacccaacaacccatgtgatcatctacattgtatcacttgacagtcccctaagcctatacagttctaccaatgggttaccaatacctggaacccaatcattgaaaagcttcaccttttttgattttaaggtgatgtttaaagattccctaatgaaaatcttttttttttttttttgagatgggtctcacactgttgcccaggctggagtgcagtggtggcatctcagctcattgcaacctctgcttcttgagttcaagcaattctcctgcctcagcctcctgagtagctgagattacaggtgcctaccaccgcacctggccaatttttgtatttttagtagaggccaggtttcaccattgttggtcaggctggtctcgaactcctgatcttaagtgatccatttgcctctgcctcccaaagtgttgggattacacacatgagccactgtgccaggccatgaaaatctgtctaagcagaacacaaaagctaggaactacaaaggaaaagacttgaagctttaaatatataaacatttaaaatttcaatatggcaaaaaagaacaataaaaattttcaaaaacaaataggagaaatacttacaattcaaaatgacaaaggactaatttccttaatctacaaagcccttgtacagattaatgagaaaaaagcataaaacccaacggaaaaaaatgagttaaggatacaagcaggcatttcatggaaacaaacaaaaaaaagaccattatgtttacacaaaggtgaacaccctcattcttaatttaaaaaatgaaaacaggctgggtgcagtggctcacacctgtaatcccagcagtttgagaggctgaggtaggcggttcactcgaggttaggagcttgagaccagcctggccaacatggtgaaccccccgtctctactaaaaatacaaaaattaaaaattagctgggcatggtagtgggcacctgcagtcccagctacccaggaggctgaggcaggagaatcgcttgaacccgggaggtggaggttgcagtgagccgagattgcgccactgaactgcactccagcctgggcaacagagcgagactctgtctcaaaaaaaaaaaaaagaaagaaagaaaaaagaaaaagaaaaaagaaaagaaaagagaaaagaaaaaaaagaaaaggaaaagaaaatttcaaaggaggctggcaaattctcagagtttggcgatactcagtgctcatgagggtgaggggaaataggtactctcatactttgtggtaggagcataaattgggcaatttggcaataccaagacctagatttcaactaccacttcatgtgttacagacattacagacccactagctgtttcttttcccctcactcacaagtaacattcagcaccaccgaaacggacacggactgatccctccccagcctgcaggtaaagctgattccgttgtcattttcactgatggaagagacacagacagagctggaattgattttgtttccagatttcaaatccactctcccctcctctcggtaccagagcagttcttcctctctggtgtggttttgaacagcacatatcagagatgcttgggagccaggtgtagtatccaggatatagttctcagttttaccattcacagttaaaacagaacctgggagtatagggagaaactatttagatatacagagtaaacaaccttaatgctcatgaacaggggattggttaaataagttatgttacatcagtagaacaaaataaactctcaacgattaaaaatagtcatattgatctatatgattttataatgaaaaatattcataatgtattgttaactgaaaaagaaaaagattaaaatgtggtcatcaaatttttgtgcacattggaatcaccaggggatcttttaaaaagtactgatgtagctgggtgctgtgcctataatcccagggctttgggaggtagaggcgggaggatcgcttgagctcaggagttcaagatcagcctgggtaacatagtgagactccgtctctacaaaaaataaaaaaataaaaaaaaaaacattagccaggcatggtggtgtgcacccatacttttagctacttgggaggataaggtgggagactcgcttgagcccaggaggtggaggttgcagtgagccaagatcgcaccattgaactccagtctgggtgatagagcaagaccttgcccccaaaaaaaagtactgatgcctgattctcatccccagacatctgattagttgacatgagtgcaatctgggcattgtgttgtttaaaggcaccccaccccccgacccccggtgatttgagaagcatcaggttagaaatcaatacatacagaatgatcatacacatatgtgtgtatgtgtgtatacatggaagtattttttcatggaaaaaagacaggaaaaaacccatatatattgaatacacacacacgcatgcatatatgtatatacatatacacataccatatttaatttgtttacttgaagggattgaaagtgggaaagcaagggaatgaaatggaaaaatatttaaggtataaactttaggcaaaaaggcagaatataaattaaagctctaataattactacaaatgtatcaaaattgcacatgcagatgagtaagaactgatttgaaaacattttctgcttaaatgataggattatggacaaattgggtcttgcatctataatgttttaatattgttttggcagtgaagaaaaataaaaagatgtttaagtagttgaggtttgtgtggtagaccagtctttgtgggttgggtgatcaggatacataccaggttttttttgttttgttttgtttttcagctctgacttttagaaacctattcattgcatagtaatacacctgaatttcggtttttatttttctgattcagaagcaagtaacaaaagctaaaaaagaactttatctgtcataaacctgtaccccagataacatttgttaatatgttctgtaaacacattaaccttccttttaaaacacttaagctggccgggcatggtggctcatgcctgtaatcccacactttgggaggctgaggcggacggatcacctgaggtcaaaagtttgagaccagcctggccaacatagtgaaaccctgtctctactaaaaatacaaaaaaattagccaggcatggtggcgggctcctgtaatcccagctactcgggaggctgaggcaggagaatcacttgaacctgggagatgaaggttgcagtgagccaagatcacaccactgcactccagcctgggcaacaaagtgagacttcttctcaaaaaagcaaaaaacttaagctacttgtaaagataatggtattgttgtctagtattttattaaaatatggaatattgagtggttgtcatctctggatgaaagtatttggggggatttgtacttttctttttttttttatagattgcctgatttattttacaatgactatgcattacttttaaaatcagaaaagagtggtaggagagcaaatgctggaaagattttcatgtgaaatggtatgttcagataaacagatgattatttggggtaacattagtaataaaatgcattaaaatgtaggaggattctggtggtggctctggagagaatagaatacttcaccttgtcttgtaataataaaaccctaaaaacaatatttttccatttgatttttttttttttttttttgagacggagttcnacctgtcgcccaggctggagtacagtgacgtaatctcggctcactcactgcaagctccacctcctgggttcacgccattctcctgcctcagccacccgagtagctggaactacaggcgcctgccagcacaccaggctaattttttgtatttttagtagagatggggtttcaccgtgttagccaggatggtctcgatctcctgacctcatgattcacctgcctcggcctcccaaagtgttgggattacaggcgtgagccacccgcctggcctccatttgattttttattgttagttgactcctgtactgtgagccatgctaactgtgtagtcattccaatttggaatttaaggatatatccaatgcccattgatcacttttcttaatcggaaatttttctttatctaaaaagaggccaaaaagaactttaacttacttgtcatctcacgtggcagaaataaaattactaagagaagaaatcttcccatttgcattatgacactgctcttccatgccatctttaatgagttaaactcagatctactaagggaaaaatagtgcagttggttttgtactttggtctgcaatgagttcgtgaaccttccttctgtctattatgcatttaaagtgaagtcccagatgaatcatcccagctataacggtactacttctagcttttaattaaacaaccctgtctgactaagttcaaagtacatttagtagtaagaaattttttttaaaagcaacataaaaccacaggaaataggctatgacagatagagcagcgtcagggtgccctggggaagatgaaaccagtcttccctagagaaactgatagaatttcattttagcagaatgaaacttgtctcattctcagacagtccctactgaacaaagtaattcttgttctgaaagtttttcttgggtcatttttgtaaagatgttctctgataatagagagtttttgagactactccaaatcccatagattcaaatggtgtgtacgtagaaaagcctcaattgaaacatggcctctagtttaaaccatgttaatcttgtctttctcccactattctctctctctcttccccttgacccaatggactaaaaataataaataataaaggtgtcctttctcccttcttgcttttgcttcaactctccctctccctaagatattctccatttccatctgggaaaaaaacatatattcattacttcctttcaagagtactactataaatatagcgaaccacatacggaaaactttctgcgcaacagggactgtgctaaacactttacatacatcatttcagtcacaattaagcctcctaacaaccctcctgaggtcgtttctatagatttaaagagactatgtaatttgcctgagatcccacagacagtaaatgtcaaggtcgggatttgaacccagactcccaagaccatgctcttaaccaccctactctcaaccaccctactacccaatctactgcctagattaatattcttttcctttaagaagctgctgttaggctgggtgcagtggctcatgcctgtaatcccagcactttaggagctgaggcaggtggattacctgaggtcaggagtttgagactagcctgaccaacatagtgaaaccccatctctactaaaaatgcaaaaaaaaaaaaaaaaaattagccaggcatggtggcgagcgcctgtaatcccagctactcgggaggctgaggcaggagaattgcttgaacctgggaggtggaggttgcagtgagccaagattatgccactgcactccagcctgggcgacagagtgaggctcggtctcaaaaaataaaaataaaaaataaaaaaataaaaaaaagctgctgttaatcttttccagtccctggccactgggagttctctccccttaacaccagtattaatttacaagagctgaaatatacctatacctactctactcctcccctgtcccaggcgtgccctgacaggagtaagtttcattcatgccaggctcaccctttctggcagacaagcctgcatcaatcttttcgtaagatgcaattactactaatattgattcttttgtaattttaaatatttgccaaaaagatttctatcacagtgttgtaacagtgattactgcagaatgtggtcaatagtagagttttctcaagcgctctgcactacaagtactcaataaaaactgagagtgcaggcttcttgccagacctcacccagccctattaaggggacaaatctatgtcttctctttccctccactccaccgagacagcaacttttcaaaatgtattcccctcacttggcttgtttttaatctgtatgactctctactttctatataagacagtcttaccacttacctcttgagctctgagaagctgacttccttggccaactgttcctctgcc

SEQ ID NO: 246 - DNA, 9656 bp, Homo sapiens
ccgaataccaggatacaacggtttgaggttctcaagaacggtaccttagtgataaggaagtttcaagtgcaagatcgaggccagtatatgtgcaccgccagcaacctgtacggcctggacaggatggtggtctttctctgggtcaccgtgcagcaacctcaaatcctagcctcccactaccaggacgtcaccgtctacctgggagacaccattacaatggagtgtctggcgaaagggaccccagccccccaaatttcctggatcttccgtgacaggagggtgtggcaaactctgtcctccgtggagggccggatcaccctgcaccaaaaccggaccctttccatcaaggaggcgtccttctcagacagaggcgtctataagtgcgtggccagcaacgcaacccgggcggacagcgtgtccatccgcctacacgtggcggcactgccccccattatccaccaggagaagctgtagaacatctcgctgcccccggggctcagcattcacattcactgcactgccaaagctgcgcccctgcccagcgtgctctgggtgctcggggatggtacccaaatccgcccctcgcatttcctccaccggaacttgtttgttttccccaacgggacgctctacatctgcaacctcgcgcccaaggacagcgggcgctatgagtgcgtggccgccaacctgatcggctccgcgcgcagtacggtgcagctgaacgtgcagcgcgcagcagcgaacgtgcagcgcgcagcagcgaacgtgcagcgcgcgccaacgcgcgcatcacgggcacctcctcgcagaggacggacgtcaggtacggagggaccctcaagctggactgcagcgcctcgggggatccctggccgcgcatcctctggaggctgccgtccaagaggacgatcgacgcgcttttcaggtaggcagctccgcgtggcttcctgtaaatcgctgggctggtggccccaacgaatataagtccttgttcaggatgaatatgcacacacattggtccctgcgtgcgataaaattaaatgaaattaattagcaggacacggtggctcacgcctataatcccagcactttggggccaaggcgggcggatcagttgaggtccggagttcgagaccagcttggctaacatggtgaaaccctgtctcaacaaacatacaaaaatttgccggacgtggtggcgagcgtctgcagtcccagctcctcgggaggctgaggtaagataattgcttgaacccagaaggtggcggttgcagtgagccaagatcacgccactgcacgccagcctggacgacagactgacactctatctaaaaatataataagttaattaattaagttgagacagggtgttgctctgtcacccagactgcagtgcagtggtgcgatcatacctcactgcagcctcaaactcctgggctgaagcgatcccctgagtagctgggattacaggtgtgcaccatgaggcacgactcttcttcttcttcttcctcttctccttcttcttcttcctcttcttcttcttttcttctttcttcttcttcttcctcttcttcttcctctccttcttctccttcttcttcttcctttcttcttcctcttcttcttcttttctttctttctttttctttcttcttctttcttcttcttcctcttctttcttcttcttttcttctttcttcttcttctccttcttcttcttcttcttcttcttcttcttcttcttcttcttcttcttcttcttctttcttctctcttcctcttcctattcttcttcttctttcttcctcttcctcctcttcctcttcctcttcttcttctttcttcaatttatgtagagatgggatctgctatgttgccaagtatgatcttgaacacttaacctcaagcagtcctcctgccctgacctaccaaagtgctgagatgacaggcttgagccaccgcgcctgaccctgtgtgtgatttttatgcaatgacattttgtatctctaaacttggatctacaacgaatgcttaacttcctcttaacaaatacttaacttcctcctctcttgtcccattcaaaaaaaaaaaaaaaggaaaaaaataaatcaagaaactgttgttttaatgattatatgtttaactataatgttagggcaaacaattcagcttgcttctatttccattgtagatttcaacaatatacatagatgtgttaggctttattttaatatggcattattggtacaatcaaagtgtacacattgttttaaaagcatcattaccacaccaacatagtgcacttgaaatgatacaaatgtacttgggctatgaagaaagccaccttctaatcaagtaccatcagttcccagatatacaggtttatggcagtgcttttcaaccaagggtgattttgccccaggacaacccttggcaacatccgaagacacctttgattatcacaaatggggcggtgggtgcttctggtatctggtgggtggagcccagggacagtgctcaacaccttgcagtgcacaggatggcccatcacagatagtcatccatcctaccttcaatgtccatagtgccgaggtcaagttactctgtcttagcaggaaagattctatctatctatctgtctatctatctatctatctatctatctatctatctatctatctaatctataatctatccatccttctacctatttcatctatcttctatctatctatctatctatctatctatctatctatctatcatctctctgtctatccatccattatctatggcagtcgtttgcaaccaggcatcaggtgttccttagtccctaggggacacttggtgatgtatggagacatttttggtcatcatgactctggggtggagggtgtgcttctggtatctggttgctgcagccctgggatcctgctcaacatcctacagtgcacaagacaccccaccacagattagcattcatcttgccttaaatgttaatactgctgaggtcaagtaaccctgtcttagcatgtaagattttgtctgtccatttagctatctatttatccattcattcattcctgtatacctaacctatcatccatccttatctcttgtgtatctattcattcaatcatacacccatatctgtctgtctgtctatctatctatctatctatctatctatctatctatctatctatctgcctatctgcctgcctacctatccctctatggcaattgcttgcaaccagggagattttattcccaggagatatttggctatgtctgacaacaatttttttggttgtcacaaatgggatgaatgttactggcatctggtgggtggagcccagagatgctgctcaacaccctacagtgcacaagacagacccaccacaaagaatcctccatacagccttaaatgtccctagtactgaagccaagaaaccctatcttagtatgaaaatgttggtctatctgtctatatacctgcttatctatccatccatttctatctacctaacctatccatccatccattctaatgtcttatgtatccatctattcatccatccacccatctctccatccatttatccatccatccatcgatatgtatgtatgtatgtatgtatgtatctttctatctatctatctatctagtctgtctactgatctagctagctagctagctatggtagttgtttgcaaccaaggagattttactcccaggagacatttggctgtgtctggaaacattttttggttgtcacagatgggatggatactgctggcatctggtggatggagtccagggacattgctcaacaccctacagttcataggttggccccatcacagagaatcatctaggctcaaatgtcactagtgccaaggttgagaaaccctgagctagattcaaaaaagggctaatatctctttaataagtgtgtcaaaaaatagaggacactgacagtagagtaaaggtaaaatggagtccaactcagttcacgctgctatggtggagaatccctggattgtgctgtcttcggcattcagcagctcaagcaggaaagcctctcaccatggtgagagcaaaatcagtgtccaagggtttcttctgcacatttgtatctgcccttctaggactctttgcagttcaggaaaagggctgagatgcctttcccctgcctgtattttatactttagatggctgggtggtgctctgaagagcttgcacaatcagtccagaagaatcatgtaccaaatatacccaggaatgccttccagcttagcagatgtgctgccactaagaaaactgttttccattgaatttggcatggtggaggcaattttgaatggataacagtacaagaatgcagttccactaggatttttgagtcattctattaatatctccatataaatcctaaataaattataaactgttatttatgttactttattctttgtaaattctgactatattcttagtaaagtgtaattgaacaaatcatgtgcattttgtcagagcaggctcttccctgcctacatgttgggattatttaaaaataaaaatatagggccttgtgtgatgcctgacacctgtaatcccagcactttgggaggccaatgtgggtggattgcttgaggtcaggagttcaagaccagcctgaccaacatggtgaaaccctgtctctactcaaaatacaaaaattagcagggcatagtgcacatgcctgtagtcccagctacttggaagcctgaggcaggagaattgcttgaacccagaaggtagaggtttcagtgagccaagatcaggccactgcactgcagcctgggtgacaaagtgagactccatctcaaaaaacaaaaagaaaaacaagtatcagagctttgtttcttgaagtcaaatccctcacaatgcatagacatctgtggctttcagatttgctcagttgatttattctgatgaaaactggattaggggtcactgttacggaagccatagaacgtttacatacacatgctaccataatcatttttggattcaaactccaagacacattaaaatgtgcttgcctgccccacagctattaaattccttactgagttacattgacttcattctcactcataacccacaaaacagtatattttgtcattgttaattgttgcttttattacaatgattaggttgaatgtaagcacaagcaggctcatttttgttaagatctatgacattgtcttagacatgtcattagaaaaatggaatgttgccacatgtggtggcacatgcctgtattcccagcactttgggagatgagcagaaggatcacttaagtccaggagttcaaaaccagcccagacaacatagcaaaatcctgtctctacaaaaaaacaaaaacaaaaaagcaaaaaacaaacaaacaaacaaacaaacaaacaaaaaaacacctccagccaggcataggcatattggtatatggttatagtccaaactactcaggaggctgagataatagggtcccttgagtccaggagatcaagactacagttagctatgattgcaccactgcactccaccctggatgacaaagcaagatcccaattcttcagaaaaaaaagaaagtgtggcatttaggaaatattaaggctcccattacaatgtatgtgtcatggaggattcaacagggacaattttaaaagtgagaactttctcaatcttttcactggattatccaacatgctagttctgaataactaaaggatacttcagtatttatgaaactgttacatatataatgaagattttcctatcatcctttctaggttgcctctattaaactgtttgtaattattaactcagcagtgcttagacttcatggggaagaatggtacaccagccttggggtcttagctagtgagtgttattcagctttaattacaaattctagaaaacccgttacaccaatattgccaacttctgaagagcccaattttagccttggaactctgggcataaccataattacatgaccttagagttgctttttctgactcttgcccaaaactgggatacaacagcttaaaaaaaaaattgccaaaagtagaaacagtgtctaaagcattttctccaggaagaaattaacatctttattaggctgactcagattcatcaccatctccatgactgcagcattttatctgattttgtttttacattgacctctgcaatgactaccatgcaaatacttgatccagacacacttgcaggaataggactgacatctttgactacatttcatgtccttgaacccatggtcaggccaacctaacatcagatttaacagggagttgttatttgcagtcaatcactttccacaatcttctccaggctgtaaaaaccattgggcattttgcaatagcagccacgtgggctgatgcatcacagaaatacctattttttgtgttattccagtgacataacgccatggtagagtatttgggaaactgacatcttaattgtttttctttttttctgtagttttgatagtagaatcaaggtgtttgccaacaggaccctggtggtgaaatcaatgacagacaaagacgccggagattacctgtgtgtagctcgaaataaggttggtgatgactgcgtggtgctcaaggtggatgtgatgatgaaaccggccaagattgaacacaaggaggagaacgaccacaaagtcttctacaggggtgacctgaaagtggactgtgtggccactggacttcccaatcccgagatctcctggagcctcctggatgggagtctggtgaactccttcatgcagtcagatgacagtggtggacgcaccaagcactatgtggtcttcaacaatgggacactctacttcagtgaagtggggatgagggaggaaggagactacacctgctttgctgaaaatcaggttgggaaggatgagatgagagtcagagtcaagatggtgacacctgccaccatctggaacaagacttacttggcagttcaggtaccctatggagatgtggtcactgtaacctgtgaggccaaaggagaacccatgcccaaggtgacttggttgtccccagccaacagggtgatccccacctcctctgagaagtatcagatataccaatatggcactctccttattcagaaagcccagtgctctgacagcggcaactacacctgcctggtcaggaacagtgccggagaggataggaagacagtgtggattcacgtcaacctccagccacccaagatcaatggtaaccccaaccccatcaccaccgtgtgggagatagcagccgggggcagtcggaaactgattgactgcaaagctgaaggcatccccaccccgagggtgttatgggcttttcccgagggtgtggttctgccagatccatactatggaaaccggatcactgtccatggcaacggttccctggacatcaggagtttgaggaagagcgactccgtccagctggtatgcatggcacgcaacgagggaggggaggcgaggttgatcgtgcagctcactgtcctggagcccatggagaaacccatcttccacgacccgatcagcgagaagatcacggccatggcgggccacaccatcagcctcaactgctctgccgcggggaccctgacacccagcctggtgtgggtccttcccaatggcaccgatctgcagagtggacagcagctgcagcgcttctaccacaaggctgacggcatgctacacattagcggtctctcctcggtggacgccggggcctaccgctgcgtggcccgcaatgccgcggcgacacggagaggctggtctccctgaaggtgggactgaagccaagaagcaaacaggcagtatcataacctggtcagcatcatcaatggtgagaccctgaagctcccctgcacccctcctgcagctgggcagggacatttctcctggacactccccaatggcatgcatctggagggcccccaaaccctgggacgcgtttctcttctggacaatggcaccctcacggttcgtgaggcctcggtgtttgacaggggtacctatgtatgcaggatggagacggcgtacggcccttcggtcaccagcatccccgtgattgtgatcgcctatcctccccggatcaccagcgagcctaccccagtcatctacacccgtcccgggaacaccgtgaaactgaactgcatggctatggggattcccaaaggtgacatcacgtgggagttaccggataagttgcatctgaaggcaggggttcaggctcgtctgtatggaaacagatttcttcacccccagggatcactgaccatccagcaggccagacggagagacgctggcttctacaagtgcacggcaaaaaacattctcagcagtgactccaaaacaacttatatccatgtcttctgaaatgtggattccagaatgattgctcaggaactgacaacaaagcggggtttgtaagggaagccaggctggggaatcagagctcttaaataatgtgtcacagtgcatggtggcccccggtgggattcaagttgaggttgatcttgatctacaattgttgggaaaaggaagcaatacagacatgagtaaaagggctcagcctcactgagaactttcttttgtgtttacatcatgccaggggcttcattcagggtgtctgtgctctgactgtaatttttatttttttgcaaatgtcattcgactgcctgcgtaagtgtccataggatatctgaggaacattcaccgaaaataagccatagacatgaacaacacctcactcccccattgaagatgcatcgtctagttaacctgctgcagtttttacatgatagactttgttccagattgacaagtcatctttcagttatttcctctatcacttcaaaactccagcttgcccaataaggatttagaactagagtgattgttatatatataaattatatatatataaattacatttatatatatataatttatatataatatatatattttaattcagagttacatacatacagctaccattttatatgaaaaaaacatttcttcctggaacccactttttatgtaatttttttatataaatatttttcctttcaaatcagatgatgagactagaaggagaaatactttctgtctcattaaaattaataaatgattggtctttacaagacttggatacattacagcagacatggaaatagaattttaaacaattcctctccaacctccttcaaattcagtcgctactgttatgttactttctccagcaaccctgcactggggaaggctgtgatattagatttccttgtatgcaaagtttttgttgaaagctgtgctcagcggaggtgagaggagaggaggagaaaactgcatcatatctttccagaattgaatctagagtcttccctggaaagcccagaaacttctctgcagtatctgacttgtccatctggtctaaggtggctgcttcttccgcaaccatgagttagtctgtgtccatgaataatacaagatctgttatttccatgactgctttactgtaattttagggtcaatatactgtacatttgataataaaatatattctcccaaaaa

SEQ ID NO: 247 - DNA, 602 bp, Homo sapiens
ccgaataccaggatacaacggtttgaggttctcaagaacggtaccttagtgataaggaagtttcaagtgcaagatcgaggccagtatatgtgcaccgccagcaacctgtacggcctggacaggatggtggtctttctctgggtcaccgtgcagcaacctcaaatcctagcctcccactaccaggacgtcaccgtctacctgggagacaccattacaatggagtgtctggcgaaagggaccccagccccccaaatttcctggatcttccgtgacaggagggtgtggcaaactctgtcctccgtggagggccggatcaccctgcaccaaaaccggaccctttccatcaaggaggcgtccttctcagacagaggcgtctataagtgcgtggccagcaacgcaacccgggcggacagcgtgtccatccgcctacacgtggcggcactgccccccattatccaccaggagaagctgtagaacatctcgctgcccccggggctcagcattcacattcactgcactgccaaagctgcgcccctgcccagcgtgctctgggtgctcggggatggtacccaaatccgcccctcgcatttcctccaccggaa

SEQ ID NO: 248 - DNA, 9765 bp, Homo sapiens
tttgtggaacaccagtacatgtatttccagatgtcactttgacaaaaattaaaaaagaaaaatcctgaaggatttcctagagcactgcttctcagtccccacactgtcttgctgcatactgaaattgtcactacatgcaagtgacactcaaaccctgcctgccaaatctgtcatcagaagcattgcctttgactcagtttccttgcctgttaaaaatgtgtagagaagctaatcattgagagaaagtgaatgaaagcagttttttcaactgctctgatggaaacccagattcatgagaccctcttttgtccttgaaaatagcattgtcatcactgcccggtttttgggagaatattattttattatcaaatgtacagtatattgaccttaaaaatacagtaaagcagtcatggaaataacaggtcgtgtattattcatgggcacaaactgactcatggctggggaagaagcagccaccttagaccagatggacaagccagatactgcagagaagtttctgggcttttcggggaagactctagattcaattctgtaaagttatgatgcagttttctccttcctctcctctcacctcctctgagcacagctttcaacaaaaactttgcatacaaggaaatctaatatcgcagccttccccactggagggttcctggagaaggtaatataacagtggtgactgaatttgaaggaggttggagagaaattttttaaaattatatttccatgtctgctgtaatgtatccaagtcttgtaaagaccaataatttattaattttaataagacagaaagtatttctccttctagtctcatcgtctgatttgaaaggaaaaaatatatatataaaacattatataaaaagtgagttccaggaagaaatgtttttcttttttcatataaaatggtagctgtatgtatgtaactctgaattaaaatatatatatatatcagtcactctggttctaaatccttattgggcaagctggagttttgaagtgacagaggaaataactgaaagatgacttgtcaatctggaacaaagtctatcatgtaaaaactgcagcaggttaactaggtgatgcgtcttcaatggggtagtgaggtgttgttcatgtctatggcttatttttgatgaatgttcctcagatatcctatggacgcttatgaaggcagtcgagtggcatttgcaaaaaaagaaaaattgcagtcagagcacagacaccctgaatgaagcccctggcatgatgtaaacacaaaagaaagtgtctcagcaaggctgagccctccttctcgtgtctgcattgcttccttttcccaacaattgtagatcaagatcaacctcaacttgaaacccaccagaggccaccatgcactgtgacacattatttaagagctcctattccccaacctggcttcccttacaaaccccgctttgttgtcagttcctaagcaatcattctggaatccacatttcagaagacgtggatgtaagttgttttggagtcactgccgagaatgttttttgccatgcacttgtagaagccggcatctctctgtgtggcatgctggatggtcagtgatccctgggggtgaagaaatctgtttccatacagacgagcctgaacccctgccttcagatgcgacttatccggtaactcccacgtgatgtcagctttgggaatccccatagccatgcagttcagtttcacggtgttcccgggccgggtgtagatgaccggggtgggctcgctggtgatccggggaggataggcgatcacaatcacggggatgctggtgaccgaagggccgtactccgtctccatcctgcatacataggtacccctgtcaaacaccgaggcctcacgaaccgtgagggtgccattgtccagaagagaaacgcgtcccagggtttgggggccctccagatgcatgccattggggagcgtccaggagaaacgtccctgcccagccccgggaggggtgcaggggagcttcagggtctcaccattgatgatgctgaccaggttatgatactgcttgtttgcttctggcttcagtcccaccttcagggagaccagcctctccgtgtggccagcggcattgcgggccacgcagcggtaggccccggcgtccaccgaggagagaccgctaatgtgtagcatgccgtcagccttgtggtagaagcgctgcagctgctgtccactctgcagatcggtgccattgggaaggacccacaccaggctgggtgtcggggtccccgcggcagagcagttgaggctgatggtgtggcccgccatggccgtgatcttctcgctgatcgggtcgtggaagatgggtttctccatgggctccaggacagtgagctgcaggatcaacctggcctcccctccctcgttgcgtgccatgcataccagctggacggagtcgctcttcctcaaactcctgatgtccagggaaccgttgccatggacagtgatccggtttccatagtatggagctggcagaaccacaccctcgggaaaagcccataacaccctcggggtggggatgccttcagctttgcagtcaatcagtttccgactgcccccggctgctatctcccgcacagtggtgatggggttggggttaccgttgatcttgggtggctggacgttgacgtgaatccacaccgtcttcctatcctctcccgcgctgttcctgaccaagcaggtgtagttgccgctgtcagaacgctgggctttctgaataaggagagtgccatcttggtatatctgatacttctcagaggaggtggggatcaccttgttggttggggacaaccaagtcaccttgggcatgggttctcctttggcctcacaggctacagtgaccacgtctccatagggcacctgaaccgccaagtaagtcttgttccggatggtggcgggcgctgtcaccaccttgactctgactctcatctcgtccttcccgacctgattttcagcaaagcaggtgtagtctccttcctccctcatccccacttcgttaaagtagagtgtcccattgttgaagacgacatagcgcttggtgcgtccaccgctgtcatccgactgcatgaaggagttcaccagactcccgtctgggaggctccaggagatctcgggattgggaagcccggtggccacacagtccactttcaggtcacccccgtagaagactttgtggtcgttctcctccttgtgttcaatcttggccggtttcatcaccacatccactttgagcaccacgtagtcatcaccaaccttatttcgagctacgcacaggtaatctccggcatctttgtccgtcactgatttcaccaccagggtcccattggcaaacaccttgattctgctatcaaaactacagaaaaaaagaaaaaggagtaagatgtcagtttcccaaatgctctagtgtggcattaggtcgctggaataacacaaaaataggtgtttctgtgatgcatcagctcaggtggctgctattgcagaatgcccagtggtttttacagcctggagaaggttgtggaaagtgattgactgcaaataagaactccctgttgaatctgatgttaggctggcctgaccatgggttcaaggacatgaaatgtagtcaaagacgtcaatcccattcctgcaagtgtgtgtggatcaagtatttgcatggtggtcattacagaggtcattgtaacaacaaaatcagataaaatgctacagtcatggagatggtgaagaatctgggtcaaccttataaagatgttaaattcttcctggagaaaatgctttagacacggtttctactcttggcaatttctttttttaaagctgttgtatcccagttttgggcaagagtcagaaaagcaactctaataaggtcatgtaattatggttatgcccagagtttcaaggtgagttttaaggctaaaattgggatcttcagaagctggccctattggtgtaacaggttttctagaatttgtaattaaagctgaataacactcactagctaaaacctcaaggctggtgtgtcattcttccccatgaagtccaagcactgccgagttaataattacaaaaaggtttaacagaggcaaactagaaaggatgataggaaaatcttcattatgtatgtaagagttttataaatactgaagtatcctttagttattcggaactaatatgttgaataatccagtgaaaagattgagaaagttctcacttttaaagttgtccctattgaattctcaattacacatacattataatgggagccttaatatttcctaaataccacactttcttttttttttttttttttaagaactgagatcttgtttgtcacccaggctggagtgcagtggtgcaatcatagctaactgtagtctcgatctcttggactcaagggacacttccatctcagcctcctgagtagcttggactacaacaatacaccaatatgcctggatggagttttttttattttttattttgtagagaagggatcttgctatgttgtccagactgagtttgaactcctggacttaagtgatccttctgccttggtctcccaaagtgctgggattacaggcatgagccaccatacctggcaagactccatttttctaatggcatgtctaagacactgtcatagatcttttaaaataagcccagttgtgattacattcaacctaatcattgtaataaaagcaatgattaacaatgaccatatacactgttttgtgggccatgagtgagaatcaagtcaatgtaacttggtaaggaatttaacaggtgtgggacaggcaaggacatttaaatgtgccttggaatttgaatccaaaaatgagtatggtagcatgtgtctgtaaacattctgaggcttccattaacagtgacccctagcccagttgtcatcagaatcaactgagcaaatctcaaagccacagatgcctgtgcatcgtgagagattcagcttcaagaaacgaagctctgatatttgtttttgtttttgttttttgagatggagtctcgctctgtcacccaggctggagtgcagcggcctgatctccgctcactgcaacctccgcctcccaggttcaaatgattctcctgcctcagccttccgagtagctgggtctacaggcataggccaccacgccctgctaatttttgtattttgagtagagacggggtttcaccatattggtcaggctggtcttgaactcctgacctcaagcaatccacccacctcggcctcccaaagtgctgggattacaggtgtgagccactgcgcctggctcaatatttgtatttttaaatagcagggcagagcctgctctttgacaaaatgcacatggtttgttcaattacactttactaagaatatagtcagaatttactaagaatgaagtgacagaaataatggtttataatttatttaggatttatatggagacattaatggaatgacccaaaaatcttactggaactgcattcttatactgttatccattcaaaattgcctccaccatgccaaattcaatggaaagcagttctctatgtggcagcacatctgctaagctggaaggcattcctgggtaaattgggtacatggctcttctggattgattgtgcaagctcttcagggcaccacccagccatctaaagtataaaatacaggcagggaaaaggcatctcagcccttttcctgaattgaaaagagtcctgggaggccagacacaactgtgcagaagaaaaccttggacgctgattttgctcctaccctggggagggacccacggtaagaggctttcctgctcgagctactgagtgctgaagacagcacaatccaggggttctccaccattgcactgtgaatttagttggactccattttacctttcctctactatctgggtcctctattttttgaaacgcttattaaagagatattagctctttttttgtatctagctcagggtttctcaatcttggcactagggacatttggggctagaagattctctgtgatggggccatcctgtgaactgtagggtgttgagcagtgtccccggactccacccaccaggtgccagtagcatccatcccatctgtgataaccacaaaatgttgccagacacagccaaatgtctcctgggagtaaaatctccttggttgcaaacaactgccatagctagctagctagatagatgagtagacagatagacagatagatacggatggataaatggatggatagatggatggatggatgaatagatggatacgtaagagataagaatgaatggatggataggttaggtagatagacatggatggatggataagcaggtatatagatagaccaacattttcatactaagatagggtttcttggcttcagtactagggacatttaaggctggatggaggattctctgtggtgggtctgtcctgtgcactgtagggtgttgagcagcatctccgggctccacccaccagatgccagtaacattcatcccatttgtgacaaccaaaaaaatgttgccagacatagccaaatatctccttggaataaaatctccttggttgtaaacaactgccatagacaggtaggtaggcagatagatagatagatagatagatagatagatagatagatagatatgggtggatgcatgaatgaatagatacataagagataaagatggatggataggttaagtatacaggaatgaatgaatggataaatagataggtaaatggataggcaaaatcttacatgctaagacagggttacttgacctcagccgtagtaacatttaaggcaagatgaatgctaatctggggtggggtgtcctgtgcactgtagggtgttgagcagcatcccggggctgcagccaccatataccagaagcacaccctccaccccagagtcatcatgacctaaaatgtctccatacatcaccaactgtcccttggggactaaggaacacctgatgcctggttgcaaaccactgccatagatgatggatggatagacagaaagacagacagatgatagatagatagatatagatagatagatgatagatagatagatagatagatagaatagatagatagatagatgatagatagatagatagatagatagatagaacctttcatgctaagacagagttacctgaccttggcactatggacattgaaggtaggatggatgacaatctgtgatgggccatcctgtgcactgcagggtgttgagcaccgtccctggcctccacccaccagataccagaagcacccactgccccatttgtgataatcaaaggtgtcttcagatattgccaagtgttgtcttggggcaaaatcacccttggttgaaaagcactgccataaacctgtatatctgggaacagatggcacttgattagaaggtggcttggctttcttcatagcccaagtacatttttatcatttcaagtgcactatgttggtgtggtaatgatgcttttaaaacaatgtatacactttgactctatcaataatgtcatattaaaataaagcctaacacgtctatgtattttgttgaaatcaataatggaaatagaggcaagctgaattgtttgtcctaacattatagttaaacatataatcattaaaacaagaatttcttggttcatttatccttttttcctttttttttttatggggcaagagaggaggaagttaagtatttgttaagaagttgagtatttgttctggatccgagtttagagggacaaaatttcattgcagaaaaagcacacactggggccgggcgcggcggatcaggaggtcaggagatcgagaccatcctggctaacacggtgaaaccccgtctctactaaaaatacaaaaaattagccaggcgtggtggcgggcgcctgtagtcccagctacacgggaggctgaggcaggagaatggcgtgaacccgggaggcggagcttgcagtgagccaagatagtgccactgcactccagcctgggccacagagcgagattccgtctcaaaaataaataaataaataaataaataaataaataaataaataaataaatcacacaccgggccaggcacaggagctcaagcctgtcatcccagcactttgggaggtcagggcgggaagattgcttgaggtgaagtgttcgagatcatccttgggaacacagcagaacccatctctacaaaaagttaataataataataataataacaagccgtgcctcatggtgcacacctgtagtcccagctacttcaggaggctgaggctggacgatcgcttgaacccagaagtttgaggctgcagtgagctatgatcgcaccactgcactccagcctgggcaacagagtgacaccctgtctctaatgaatttattattattattatttgagatggaatgtcactctgtcgtccagggtggagtgaagtggcatgatcttggctcactgcaacctccacctcccgggttcaagcaattctcctgcctcagcctccagagtagctgggactacagacgctcgccacaatgcccgcaaatttttgtatgtttattagagacagtgtttcaccatgtcggccaggctggtctcgaactcctgacctcaagtgatccgcccgcctcgtcctcccaaagtgctgggattacaggcgtgagccaccgtgccctgctaattaatttcatttaattttatcggacgcagggagcaacgtgtgtgcatattcatcctgaaaaaggactcatattcgttggggccaccagcccagcgatttacaggaagccacgcagagctgcctacctgaagagcgcgtcgatcatcctcttggacggcagcctccagaggatgcgcggccaggggtcccccgaggcgctgcagtccagcttgagggttcctccgtacctgacgtccgtcctccgcggggaggtgcccgtgatgcgcgcgttggctgctgcacgctgcacgttcagctgcaccgtcctgcgcgcggagcctaccaggttggcggccacgcactcatagcgcccgctgtccttgggcgcgaggttgcggatgtagagcgtcccgttggggaaaacaaacaagttcccgtggaggaactgcgaggggcggatctgggtaccgtccccgagcacccagcgcacgctgggcaggggcgcagccttggcagtgcagtgaatgtgaatgctgagccccgggggcagcgagatgttctccagcttctcctggtggataacggggggcagtgccgccacgtgcaggcggatggccaggctgtccgccccggctgcattgctggccacgcacttatagacgcctctgtctgagaaggacgcctccttgatggaaagggtccggttttcgtgcagggtgatgcggccctccacgggggacacagtttgccacaccctcctgtcagggaagatccaggaaatttggggggctggggtccctttggccagacactccattgcaatggtgtctcccaggtagacagtgacgtcctggtagtgggaggctaggatttgaggttgctgcacggtgaccgaaagcaagaccaccatcctgtccaggccgtgcaggttgctggcggtgcacatatactggcctcgatcttgtacttgaaccttccgtatcactaaggtaccgttcttgagaacctcaaaccgttgtatcctggtattcgg

SEQ ID NO: 249 - DNA, 25395 bp, Homo sapiens
tattttcttttttttttttttaattatactttaagttctagggtacatgtgcacaatgtgcaggttagttacatatgtatacatgtgccatgctggtgcgctgcacccactaactcgtcatctagcattaggtatatctcccaatgctatccctcccccctacccccaccccaaaacagtccccagagtgtgatattccccttcctgtgtccatgtgatctcattgttcaattcccacctatgagtgaaaatatacggtgtttggtttctctttcttgcgatagtttactgagaatgatgatttccaatttcatccatatccctacaaaggacatgaactcatcattttttatggctgcatagtattccatggtgtatatgtgccacattttcttaatccagtctatcattgttggacattttggttggttccaagtctttgctattgtgaataatgccacaataaacatacgtgtgcatgtgtctttatagcagcatgatttatagtcctttgggtatatacccagtaaggggatggctgggtcaaatggtatttccagttctagatccctgaggaatcgccacactgacttccacagtggttgaactagttgacagtcccaccaacagtgtaaaagtgttcctatttctccacatcctctccagcacctgttgtttcctgactttttaatgattgccattgtaactggtgtgagatggtatctcattgtggttttgatttgcatttctctgatggccagtgatgatggacattttttcatgtgttttttggctgcataaatgtcttcttttgagaagtgtctgttgatgtccttcacccactttttgatggggttgtttgtttttttcttgtaaatttgtttgagttcattgtagattctggatattagccctttgtcagatgagtaggttgtgaaagttttctcccatgttgtaggttgcctgttcactctgacggtagattcttttgctgtgcagaagctctttagtttaattagatccaatttgtcaattttgtcctttgttgccattgcttttggtgttttagacatgaagtccttgcccatgcctatgtcctgaatggtaacgcctaggttttcttctagggttttgatggttttaggtctaatgtttaagtctttaatccatcttgaattgatttttgtataaggtgtaaggaagagatccagtttcagctttctacatatggctagccagttttcccagcaccatttattaaatagggaatcctttccccactgcttgtttttctcaggtttgccaaagatcagatagttgtagatatgcgacattatttctgagttctctgttctgttccattgatctatatctctgttttggtaccagtaccatgctgttttggttactgtagccttgtattatagtttgaagtcaggtagtgtgatgcctccagctttgttcttttggcttaggattgatttggcgatgtgggctcttttttggttccatatgaactttaaagcagttttttccaattctgtgaggaaagtaattggtagcttgatggggatggcattgaatctgtaaattacctttggcagtatggccattttcacgatattgattcttcctacccattagcatggagtgttcttccatttgtttgtatcctcttttatttccttgagcagtggtttgtagttctccttgaagaggtccttcacataccttgtaagttggattcctaggtattttattctctttgaagcaattgtgaatgggagttcactcatgatttggctctctgtttgtctgttgttggtgtataagaatgcttgtgatttttgtacattgattttgtatcctgagactttgctgaagttgcttatcagcttaaggagattttgggctgagacaatggggttttctagatatacagtcatgtcgtctgcaaacagggacaatttgacttcctcttttcctaattgaataccctttatttccttttcctgcctaattgccctggccagaacttccaacactaggttgaataagagtggtgagagagagggcatccctgtcttgtgccagttttcaaagggaatgcttccagtttttgcccattcagtatgatattggctgtgggtttgtcatagatagctcttattattttgaaatacgtcccgtcaatacctattttattgagagtttttagcatgaagagttgttgaattttgtcaaaggccttttctgcatctattgagataaacatgtggtttctgtctttggttctgtttatatgctggattacatttattgatttgtgtaaattgaaccaggcttgcatcccagggatgaagcccacttgatcatggtgaataagcttattgatgtgctgctgggtttgttttgccagtattttattgaggatttttccatcaatgctcatcaaggatattggtctaaaattctctttttttgttgtgctctgcctggctttggtatcaggatgatgctgtcctcataaaaagagttagggaggattccctctttttctattgattggaatagtttcagagggaatggtaccagttcctccttgtacttctggtggaattcggctgtgaatccatctggtcctggactctttttggttggtaaactattgattattgccacaatttcagatcctgttattggtctattcataggttcaactttttcctggtttagtcttgggagagtgtatgtgtccaggaatttatccgtttcttctagattttctagtttatttgcatagtggtgtttgtagtattctctgatggtagtttgtatttctgtgggatcggtggtgttatcccctttatcattttttattgcatctatttgattcttctctcttttttctttattagtcttgctagcagtctataagttttgttgatcctttcaaaaaaccagctcctggattcattaattttttgaagggttttttgtgtctctatttccttcagttctgctctgattttagttatttcttgccttctgctagcttttgaatgtgctcttgcttttctagttcttttaattgtgatgttagggtgtcaaatttggatctttcctgctttctcttatgggtatttagtgctataaatttccctctacacactgctttgaatgtgtcccagagattctggtatgttgggtctttgttctcgttggtttcaaagaacatctttatttctgccttcatttcgttatgtacccagtagtcattcaggagcaggttgttcagtttccatgtagttaagcagttttgagtgagattcttaatcctgagttctagtttgtatgcactgtggtctgagagatagtttgttataatttctgttcttttacatttgctgaggagagctttacttccaagtatgtggtcaattttggaataggtgctgtggtgctgaaaaaaatgtatattctgttgatttggggtggagagttctgtagatgtctattaggtccgcttggtgcagagccgagttcaattcctgagtatccttgttgacttgctgtctcgttgatctgtctaatgttgacagtggggtgttaaagtctcccattattaatgtgtgggagtctaagtctctttgtaggtcactcaggacttgctttatgaatcttggtgctcctgtattgggtgcatatatatttaggatagttagctcttcttgttgaattgatcactttaccaatatgtaatggccttctttgtctctttttatctttgttggtttaaagtctgtattatgagagactaggattgcaacccctgcctttttttgttttccatttgcttggttgatcttcctccatccttttattttgagcctgtatgtgtctcgcacgtgagatgggtttcctgaatacagcacactgatgggtcttgattctgtatccaatttgccagtctgtgtcttttaattggagaatttagtccatttacctttaaagttaatattgttatgtgtgaatttgatcctgtcattatgatgctagctggttattttgattgttagttgatgcagtttcttcctagtcttgatggtctttacaatttggcatgattttgcagtggctgttactggttgttcctttccatgtttagcgcttccttcaggagctcttttagggcaggcctgatggtgacaaaatctctcagcatttgcttttctgtaaagtattttatttctcctttgcttatgaagcttagtttggctggatatgaaattctgggttgaaaattcttttctttaagaatgttgaatattggcccccactctcttctggcttgtagggtttctgccgagagatccgcttgaatctgaacattggccttccttgctagattggggaagttctcctggataatatcctgcagagtgttttccaacatggttccattctccccatcactttcaggtacaccaatcaggcgtagatttggtcttttcacatagtcccatatttcttggaggctttgctcatttctttttattcttttttctctaaacttcccttctcacttcatttcattcatttcaccttccagtactgatgccctttcttgctgttgatcacatcggctcctgaggcttctgcattctttacgtagttcttgagccttggttttcagctccatcagctcctttaagcacttctctgtattggttattctagttatacattcttctaaagttttttcaaagttttcaacttctttgcctttggtttgaatgtcctcccatagctcagaataatttgattgtctgaagccttcttctctcagctcgtcaaagtcattctccgtccagttttcttctgttgctggtgaggaactgcattcctttggaggaggagaggctctctgctttttagagtttccagtttttctgttctgttttttcgccatctttgtggttttatctacttttggtgtttgatgatggtgatgtacagatgagtttttggtgtggatgttctttctgtttgttagttttccttctaacagacaggacactcagccgcaggtctgttggaatacccggctgtgtgaggtgtcagtctgcccctgctgggtacctcccagttaggctgctcgggggtcaggtgtcagggacccacttgaagaggcagtctgccccttctcagatctccagctgcgtgttgggagaaccactgctctcttcaaagctgtcagacagggacatttaagtctgcaaaggttactgctgtctttttgtttgtctgtgccctgcccccagaggtggagcctacagaggcatgcaggcctccttgagctgtggtgggctccacccagttcaagcttcctggctgctttgtttacctaagcaagcctgggcaatggcgggcgcccctcccccagcctcgctgccaccttgcagtttgatctcagactgctgtgctagcaatcagcgagactctgtgggtgtaggaccctccgagccaggtgcgggatataatctcgtggtgcaccgtttttttaagcccattggaaaaacgcagtattcaggtgggagtgacccaattttccacgtgccatctgtcaccccttcctttgactcggaaaggaactccctgaccccttgcgcttcccaagtgaggcaatgccttgccctgctttggctgccacacagtgcacgcatccactgacctgcgcccactgtctggcactccccaatgagatgaacccagtacctcagatggaaatgcagaaatcaccgtcttctgcgtcgctcacactgggagctgtagaccggagctgttgctattcggccatcttcaacaatgctattttcaaggacaaaagagggtcacattaatttgggtttccatcagagtggttgaaaaaactgctttcatcaccttctctcaatgattagcttctctacacatttttaacaggcaaggaaactgagtcaaaggcaatgcttctgatgacagatttggcaggcaggaaggcaggatttgagtgtcagttgcatgtagtgacaatttcagtattcagcaagacagcttggggactgagaagcagtgctctaggaaatcattcaggatttttcttttttatattgttttcaaagagacacctgtatatacatgtatttgtattccacaaatatgcaaaactgtccttcttttgcttcccctgagagtaaggaaaaaggcaaacaagataaatatttgggaaaaatattactgtcagcatttcaagaaatgcagtgtcacaaattgttaaagaatgtcggtcatggaaactaaagaatgctggtttatttttttttaactctgtggaaggcatagagcatgtctctcattcatgaatccacttatttgcttaaatatgtctgcacagcccttacttgtgctggatatcaacagagcctgaggaagcagagaggaggaggaggaggtggtgcttggagtgtttatgctcaatagactggttcttcagatggtgcagggtctctcaaaatgcccatgaatgacatttggggatggatgattctctgggcttgggtgtcctgtgtagggtgttgagaagtatccctgggctctacctgccacatgctagcatccccccacccccaaaaagttgtgatgaccaaaatgtctctggacattaccaaatgcccctttagagggtgcaaacttgctcctgagagccactgatgcggacagattagattggtaaatagataactgatagatgattgatatagatagataagtgatagatagatggtagacaggtgatagataaatgactggcagatacaaagagatagatgataggttgataatagatatagataggggacaaagattgatacagatagatgattgatagatataaatagatagtagatacagataggagtaagataggtagatagataatagatggttggatggaggatagatagataaatgatggatggataaatgatggatggttggatggatgatagatacacagataaataaatgatggatggttgggtggatgataggtatatagataaatagatgtatgtttggatgaattatagatagaagatagagtgacagataatgtatggttgaatagatgatcaataattggatagatacctatgtagatagactgatgacagatggttgggtggattagataggtagttgggtagatgatagatgtatagataaatagaagatgcatggttggataggtgatagatgaatggatggatgatagatgagagatgagagatagagatgagagatagatagatagagatgagagatagatacatacatacatacatacatacatacatacatacatacacagacaaataaatgagggttgactggatggataatagatagagtttctcatgctaaggatttctccgcctcagcagtatggacatctggggcaggaggattctctatggtgggactgtcctgtgcactgtagggtgttgagcagagtccctgggctccacccacaagatgccaggagcacgcaccaccccagtggacaaccaaaaatgtctctagatatggctacattccctgcataaggctgtacctttcctgattgcgaaacactgtgctaggtaaatacacgcagcagagggtttcagaaacatgttcatttggacagtcttcttcagtgcatgatgtggaaactgagatctggggaggtaagttcacctaggtgtagagaatgtttctgcaggacataccttggtaaaattttacctggaaaaaaattggcaaaaacatcctatcaacaaaaatttctgcattcacatgaggtgatgggctgaagaggtgtttggaaacattaaaagtgtttcagagagcattcagattctagaagattaaaaaaccaagtgggattgtagtcccatttaaaaagagctatatttttatgacttagatagcattttcactgagtcaagaatagaagaatggctgggcagaatgatatgaacaaatgagaggacgtgttctcctggccgcaaaaagatcatgaagaaagtgcgaccctcaagtaaagagacctggggtttagtaatagatataatgtaatagtggtgcaggcccgtagtcacagctactcaggaggctgagctaggaggattacttgagcccaggagtttgaggctgcagtttgcaaaaaaatcatttctacctgcaacctgtcagtgcaaccttatttgaaaaaagagtttttgcagatgtaatcatgtgaaggacctggaaatgagattattctggataaggatgggttctaaatgcaataagtgtgcctataagagacaaatcaggggacacagacacagaggaggaggccatgtggagacagaggcagaaaatggagtgacatggcccagggattcctggagcccccaggatctggaagaggtaggaaggatcctcccctggaacatccagagggaactgcatacaattgtagtgcattgaacagtggcccccaaaatatatgcccatattctgactcccagatcctgggaatgggaccttatttggaaatagggtctttgcaggtgtaattaagttaaagatcttgagacgagttcatcctggattagacgggctctaaatccaataataggtgtctgtcctaagagacaaaacaggaggaacagacacaggagaaggccttgtggagatggaggcagactggagtgatgcagccacaagcccagggacatctggagccccccaggagctgggagaggcaggaaggatcctcccctagagcctccatagggagcatggccctgagacactttgatgtcagacttctggtctccaaaactgagaaggagtccattctgtttttttttttttctttctgaaggtaacatatatttttatttcttttcttattattattatactttaagttttagggtacatgtgcacaatgtgcaggtttgttacatatgtatacatgtgccatgttggtgtgctgcacccattaactcatcatttagcattaggtatatcacctaatgctatctctcctctctccccacactccaaaacagtccccgatgtgtgatgttccccttccggtgtccatgtgttctcattattcagttcccacctatgagtgagaacatgcggtgtttggtttttgtccttgtgacagtttgctgagaatgatggtttccagcttcatccaggtccctacaaaggacacgaactcatcattttttatggctgcatattattccatggtgtatatgtgccacattttcttaatccagtctatcattgttggacatttgggttggttccaagtctttgctattgtgaatagtgccacaataaacatgcatgtgcatgtgtctttatagcagcatgatttataatcctttgggtatataaccaataatgggatggctgggttaaatggtatttttagctctagatcccagaggaatagccacaccaacttccacaatggttgaactagtttacagtcccaccaacagtgtaaaagtgttcctatttctccacatcctctccagcacctgttgtttcctgactttttaatgattgccattctaactggtgtgagatggtatctcattgtggttttatttccatttctctgatggccaatgatgatgagcattttttcatgtgttttttcactgcataaatgtcttgagaagtgtctgttcatatccttctcactttttgatggggttgtttattttttttcttgtaaattagtttgagttcattgtagattctggatattagccctttgtcagacaagtaggttgcaaaaatgttctcccattctataggttgcctgttcactctgatggtggtttcatttgctgagcagaagctctttagtttaatcagatcccatttgtctattttggcttttgttgccattgtttttggtgttttagacatgaagtccttgcccatgcctatgccctgaatggaaatgcctaggtattcttctagggttttttatggttttaggtctaacatgtaagtctttaatccatcttgaattaatttttgtataaggtgtaaggaagggatccagtttcagctttctacatatggctagccagttttcccagcaccatttcttaaataaggaatcctttccccattgcttgtttttctcaggtttgtcaaagatcagatggttgtagatacgtggcattatttctgaggactctgttctgttccattggtctatatctctgttttggtaccagtaccatgctgtttttgttactgtagacttgcagtatagtttgaagtcaggtagcgtggtgcctccagctttgttctcttttggcttaggattgacttggcaatgtgggctattttttggttccatatgaactttaaagtagatttttccaattctgtgaagaaagtcattggtagcttgatggggatggaattgaatctataaatttccttaggcagtgtggccattttcatgatattgattcttcctacccatgagcatggaatgttcttcaagttgtttatatcctcttttatttcattgagcagtggtttgttgttctccttgaagaggtccttcacatcccttgtaagttggattcctaggtattttattctctttgaagcaatcgtgtatgggagttcactcaggatttggctctctgtttccctgttattggtgtgtaagaatgcttgttagttttgcacattaattttgtatcctgagactttgctgaaattgcttatcagcttaaggagattttgggctgagacaatgggtttttctagaaatacaatcatgtcatctgcaaacagggacaatttgacttcctcctttcctaattgaatgccctttattttcttctcctgcctgattgcccttgccagaacttccaacattatgttgaataggagtggtgagagagggcatccctgtcttgtgccagttttcaaagggaatgcttccagttttgtgcattcggtatgatattggctgtgggtttgtcatagatagctcttattattttgagatatgtcccatcaatacctaatttattggtagtttttagcatgaaggttgttgaattttgtcagaggcattttctgcatctattgagataatcatgtggtttttgtcattggttctgtttatatggtggattaagtttattgatttgcatatgttgaactagtcttgcatcccagggatgaagccaacttgattatggtggaaaagctttttgatgtgtttctgcattcggtttgccagtattttattgaggatttttatattaatgttcatcaaggatattggtctgaaattctctttctttgtagtgtctctgccggctttggtatcaggatgatgctggcctcattaaatgagttagggaggattccctgtttttctattgattgcaatagtttcagaaggaatagtaccagctcctccttgtatctctggtagaatatggctgtgaatccatctggtcctggacttttttggttggtaagctattaatcattccctcaatttcagagcctattattgttctattcagagattcaacttcttcctggtttagtcttgggagagtgtatgtgtcgaggaatttatccatttcttctagattttctactttatttgcatagaggtgtttatatattctctgatggtagtttatatttctgtggaatcattggcgatatcccctttgtcattttttattgcgtctatttgattcttctctcttttcttctttattagtcttgctaatggtttatgaattttgttgatcttttcaaaaagccagctcctggattcaccgaattttgaagggtttttgtgtctctatttccttcagttctgctctgatcttagttatttcttgccttctgctagcttatgaatgtgtttgctcttgtttctctagttcttttaattgtgctgtttgggtgtcaattttagatctttcctgctttctcttgtggacatttagtgctataaatttcccagtagtcattcaggagcaggttgttcagtttccatgtagttgagcggtttggaatgagtttcttaatcctgagttctagtttgattgcactgtggtctgagagacagtttgttataatttctgttcttttgtatttcctgaggagtgctttacttacagatatgtggtcaattttggaataggtgtggtgctgaaaagaatgtacattctgttgatttggggtggagagttctatagatgtatattaggtcctcttggtgcagatctgagttcaattcctagatatctttcttaactttctgtctcgttgatctgtctaatgttgacagtggggtattaaagtctcctattattgtgtgggagtctaagtctcttcataggtcgctaaagacttgttttatgaatctgggtgctcctgtattgggtgcatatatatttaggatagttagctcttcttgttgaattgatccctttatcattatgtaaaggccttctttgtctcttttgatctttgttggtttaaagtctattttatcagagactagcattgcaagctatgcctttttttgttttccatttgcttggtagatcttcctccactgctttattttgagcctatgtgtgtctctgcatgtaagatgggtttcctgaatacagcacactgatgggtctttactctttattcaagttgccagtctgtgtctttcaattggagaatttagcccatttacatttaagattagtactgttatgtgtgaatttgatcatgtcattatgatgttagctggttattttgctcgatagttgaagcagtttcttcctagccttgaaggtctttacaatttggcatgtttttgcagtggcattaccgggtgttcatttccatgttcagtgcttccttcaggagctcttttagggcaggcctggttgcaacaaaatctctcagtatttgcttgtctgtaaaggattttatttctccttcacttatgaagcttagtttggctggatatgaaattctgggttgaaacttcttttctttaatgttgaatattggcccccactctcttcagtcttgtagagtttctgctgagatatccactgttagtctgatgggcatccctttgtgggtaacccgacattcctccctggctgcacttaatattttttccttcatttcaactttgttgaatctgacaattatgtgttttggagttgctcttctcagtgagtatctttgtggcattctctgtatttcctgaattttaatgttggccttccttgcttgattggggaagttctcctggatagtatcctgtagcatgttttccaacttggttccattctcccctcattttcaggtatgccatttagatgtagatttgctcttttcacatagtcccatatttcttggaggctttgttcttgtctttttattcatttttctctaaacttctcttcatgcttcatttcattcatttcatcttccatcactgatggaagttgattgcattggttactgaggcttgtgcattcatcacatagttcttgtgccgtggttttcagctccgtcaggccctttaaggacttctctgcattggttattctaattagccattcatgtaattttttttcaaagtttttaacttctttgccatgcgttcaaacttcctcctttagctgggagtagtttaatcttctgaagtcttcctctctcaacttgtcaaagtcattctccatcctgctttgttccattgctggtgaggagctgtgtcccttttgaggaggaaaggcactctgatttttagagtttccagtttttttgctctgttttttccccatctttgtggttttatctacctttggtctttgatgatggtgacgtacagatggggttctggtgtcaatgtcctttctttttgttagttttccttctaacagtaaggaccctcagctgcaggtctgttggagtttactggaggtccactccagaccttgtttgcctgggtatcagcaatggtggctgcagaacagtggatattgttgaaccacaaatgctgctgcctgatcgttcctctagaagttttgtcttggaggagtacccggccgtgtgaggtgtctgtccacctctgctgggggtgcgtcccagttaggctactcagaggtcagggacccacttgaggaggcagtctgcctgttctcagatctcaagctgcatgctgggagaaccactactctcttcaaagctgtcagacagggacaattaaatctgcagaggttattgctgtcctttgtttctctgtgccctgccctcagaggtggagtctacagaggcaggcaggcctccttgagctgcagtgggctccacccagttcgagcttccaggctgctttgtttacctactcaaacctgagcaatagcaggtgcccctcccccagcctcgctgccaccttgcagtttgatctcagactgctgtgctagcaatgagtgaggctccgtgggcataggaccctccaagccaggtgcgggatataatctcctgttgtgccatttgataagccctttggaaaagcacagtattagggtgggggtgacccaattttccaggtgccatctgtcacccctttctttgactaggaaagggaattccctgacctcttgcacttccccagtgggcgatgcctcaccctctttggctcacacatgttgtgctgcacccactgtcctgcacccactgtctggcactccctagtgagatgaacccagtacctcagttggaaatgcagaaatcagccatcttctgcatcgctcaccctgggagctgtagactggagctgttcctattcggccatcttggctccacccccatttctgttgtttttaagcccctattttgaggtgattggttacagaagccctgagaaataaatgcaaatatttaaaattttcttgtagggatggtcatgatgataggtacttaaaacctcatgacaggtaaaataaatgatttaaaccagtttgtccagaacacaaaggtgtgatttgagcagatcattaatcagaatcacatatgactattattatttgtaaataatatactaactacaagacagttgtttttttccccctaaatggctaagttctaacatctggtatatgttcttgtaaatctgtggacacaagcaaaatccctagctaaccatccattgtcaccatttaattactctcaggccctcacagaaaaacaaaacttcaatcaggctctagtccttgaagtctggtttgtaattgcaaaggctgttcttgtttaaatgaagctgggctgaatgtgggacaagatgaggaagaccccaatcctgctgctgaattcagtctccaagacactgaaccccacaagattgttttctgcacttttgtcatttaagacccaagtctcacctgtaatcccagaactttgggagaccaaggcctgcagattgcttgagcccaggagttcaagaccagcctgcgcaatatagcaggatcacatctctacagaaaatacaaaaattagctaggtgtggtggtgcatgactgtagtcccaactactctgtagactgaggtaggaggatcacttaagcccaagacaatgaggctacagtgagccgagatcacaccactgcaccccagcctgggtgatagagaaagattgtctccaaaaataaaaaatgacccaagtcttttggaggtggaagttcagtaacagattaatgatgaaactaagagggctagtgttagtgagatcctggatggccagcacaaactgactgctttgggaaaaaaaaaaaaaagttggtttatcttctcctgagaggttgttcatcttactttttagtagagtctttttaaaattaaccttgttagaacacaagaaacctgtgtttcttgttggctttatgttgtcatctcctggattgatttaaacatcctcaactccaagtgtcttcatttcctggggctgcccttgcaagtgaccacagaacctatggcttaaaacaaaaggaattgattctctcacagttctggagaccagcagtctgaggtgaaagagtggacagagctatgctacctctggaggttctaggaaaggattcttcctgcctctcccagctcctggaggctctaggcatctctgggcttgttgctgcatcacttcagtgtctgcctccatctccaggtggcttactcctctccatctgtgtctccttttgtgtctcttagaaacctgctgtttaatctagggccacactaatccaggatgatctcatcttgagatccttgacttaagtatacctgcaaagccctcatttccaaataaggttccattcacatattctggggataggatgtggacatatctttttgggacactatggttcaatccattacaattgtattccactccttctggaggctctagaggaggatccttcctgtctctctcagctcctgtggactctaagcataattgggcttgtatctgcctcactccagtttctacctccatctccacatggccttctcctctgtgtctgttctcttctgtctcttttctctctctttttttaattggagacagaggttcactcttgttgcctaggctggagtgcaatgtcacgattttggttcactgaaacctctgcctcctgggttcaggcaattctccttcctcagcctcttggttttctgtaaggacatttgtccatagatttagggcttatctaatccaggataatatcattttgagatacttaagccatttatatcttatctaaataagttcacataagttccagaggttaggacatagacacatctttgagggccaccattccacctgctacacaaggctctattaatatctctgacctacaattcagaatctctgagagagaagcctgggtgagtacgaagtgcagcaagaatatgatgaggaagtggcctctttagtgctggaattcatttgttcctgaagtagtttggcaaaactatactgtgatccatcacatatttcttatgatttaaccctcaatggggcaacctattttgctaatttttatcatattgtgtggtacctccccccaagaagacattagaaccttgtgtgttgttgaaattctgcatgcttctgttttcagatttgtgggaaagaggaaaattataggatatttatctcataaagccattgtgaaaatagaatatgagattcttagaacaaagcctgtcacatcacaagtactcagtatatgttggttgtttccatacttattgctgtcatttctccagtagtttgaagagtgatggtttccaaagtatgttcaagttaagcactacaaccactcttgggagagttgaattcggatgaagcgttcttagatatgaccactatactggtgtgggattagagcatcggtgtaggttcagtcctacaccatccaacttcagctgaagcttatgcatcctaagccatgtagcagaaccagaactagaaaccaaaactagaacaaacatgtgcgctgtgctgtgttgtgcctaaccatggagctttgggaaaacatggcctatcaaacaaggttttgagtggatgggacacttgggaaaacatgcacaattaaactaggctttgagtggatgaggagccttggaaaagcatggctgatcaacaaggctttgggtggatgaaaagacttgggaaaccatggctgatcgaacaaggctttgagtggattatgagccttggaaaaatatggtccatgaaacaaagctttgggtggatggggagctttgggaaaacatattccatcacacaaggctttgagtggatgaagagccttgggaaaacatagccgaccaaacaagacttcaagtggatgagacaaaggcttgaatttatttcctgttctttaatagctgtgtgaatgtagatgtcctctacttaaacttctgtttctttgtgtatatcaagtggggatgacaccactcattttaccaggccattgggaaaaccacagatatatcataattcataggacaaaacttgaaagttccattaaaaaaagaagaaaaacactgaagctgtgtccactctctggtaggacagcataaattatctgagagaaaaatgtaccctttttttgttttaggaaacattctatgatgcttcctaattatataaacagaaaaaacttcaaggactacatagttggagttttcagtcaaggggaattactatatggtgttgtctacagaaagaaaggaagggctgaggagcccaactagacaagtaggcacctcagagagtgagtcacagactgatgatgtatcaattgtggctgcaacactgtggcccaagactgacacaggaaatgcactcaccttccatttctcccacttcttctccaaagtccgatacctgccccattgctgacttcagcaacaagtcacctgataggagctctgcaggggacattctccttgccatgcagagctgaggatatacaggaagtagatcaggaaaacgggtgccaggaaatctagtataaaagccaacaattacttacaatgcttgattgaagacatttgtctagtttctttttttatcctttggggcattttttaaaatatatatatattttattatactttcagttctagggtacatgtgcacaatgtgcaggtttgttacataaatatacatgtgctatgttggtgtgctgcacccattaactcgtcatttacattgggtatatctcctaatgttatccctcccccctccccccaccccactacaggccccggtgtgtgatgttccccttcctgtgtcccagtgttctcattgttcaattcccacctataagtgagaacatgcagtgtttggtttttttgtccttgtgatagtttgctgagaatgatggtttccagcttcatccatgttcctacaaaggacatgaactcaacattttttatggctgcatactactccatggtggtgccacattttcttaatccagcctctcattgttggacatttgggttggttccaagtctttgttattgtgagcagtgccacaataaacatacatgtgcatgtgtctttatagcagcatgatttatattctttgggtatatacctagtaattggatggctgggtcaagtgctatttctagttctaaatccttgaggaatccccacactgtcttccacaatggttgaaccagtttacagtcccaccaatagggtaaaagtgttcctattcctccacatcctctccagcacctgttgtttcttgactttttaatgattgccatactaaatggtgtgagatgatatcttactgtggttttgatttgcatttctccgatggccagtgatgaccattttctgatgtgtcttttggctgcataaatgtcttcttttagaagtgtctgttcacattcttcgcccactttttgatggggttgtttctttttttcttctaaatttgttagagttctttgtagattctggatattagctctttgtcagatgagtagattgaaaaaattttctgccactgtgtaggttgcctggtcactctgatggtaatttcttctgctgtgcagaacctctttagtttagttagatcccatttgtcaattctggcttctgttgccattgcttttggtgtcttagacatgaagtccttgcccatgcctatgtcctgaatggtattgcctggcttttcttctagggtttttatggttttagatctaacatgtaagtctttaatccatcttgaattaatttttgtatgagatgtaaggaagggatccagtttcagctttctacatatggctagccaattttcccagcaccatttgttaaatagggaatcctttccccgtttcttgtttttgtcaggtttgtcaaagatcagatagtggtagatgtgtggtattatttctgagggctctgttctgttccataggtctatatctctgtcttggtaccagtaccatgctgtttcggttactgtagccttgtagtatagtttgaagtcaggtagtgtgatgcctccagctttgttcttttggcttaggattgacgtgccaatgcgggctcttttttagttccatatgaactttgaagtagtttttttccaattctgtgaagaaagtcattggtagcttgatggggatgacattgagtctataaattaccttgggcagtatggccattttcctgatattgattcttcctacccgtgagcatggaaagttcttccacttgtttgtgtcctctttcatttcattgagcagtggtttgtagttctccttgaagaagtccttcacatcccttgtaagttggattcctacatattttattctctttgaagcagttgtgaatgggagttcactcatgatttggctgtctctctgttattggtgtataagaatgcttgtgatttttgcacattaattttgtatcctgagactctgctgaaattgcttatcagcttaaggagattttgggctgagatgatggggttttccagaaatacaatcatgtaatctgcaaatagggacaatttgactaccttttttcctaagtgaataccctctatttctttctcctgcctgattgctctggccagaaattccaacactatgttgaacaaaagtggtgagagtgggcatccctgttttgtgccagttttccaaggcaatgcttccagtttttgcgcattcagtatgatattggctatgggtttgtcataaatagctctattattttgagatacgtcccatcaatacctaatttattgagagtttttgcatgaagggctgctgaattttgtcaaaggccttttctgcacctattgagataatcatgtggtttttgtctttggctgtgtttatatgctggattacatttattaagttgtgtatattgtaccagccttgcatcccagggatgaagcccacttgatcatggtggataagctttttgatgtactgctggattcggtttgccagtattttattgaggatttttgcatcaatgttcatcaaggatattggtctaaaattctcttttttagttgtgtctctgccaggctttggtatcaggatgatgctggcctcatcaaatgagttagggaggattccctctttttctattgattggaatagtttcagaaggaatggtagcagttcctccttgtacctctggtagaattcggccatggatccatctggtcgtgtacttttttttgttggtaagctattaattattgcctaaatttcagagccttttattggtctattcagagattcaacttcttcctggtttagactttggagggtgtatgtgtcgagtaatttatccatttcttctagattttctagtttattttcattgaggtgtttatattattctctgatggtagtttgtatttctgtgggatcggtggtgatatcccctttatcattttttattgggtctattagattcttttctcttttcttcctttttagtcttgctagtggtctatcaattttgttgatcttttcaaaaaactagcacctggattcattgattttttgaaggggttttgtgtctctatctccttcagttctgctctgatcttagttatttcttgccttctgctagcttttgaatgtgtttggtcttgcttttctagttcttttaattgtgatattagggtgtcaattttgggtctttcgtgctttctcttgtgggcatttagtgctagaaatttccctctacacactgctttgaatgagtcccagagattctggtatgttgtgtctttgttctagctggtttcaaagaacatctttatttctggttttatatccttatgtatccaatagtcattcaggagcaggttgttcagtttccacgtatttgagtgtttttcagtgggtttcctaatcctgaggtctaatttgattgcactgtggtctgagagaccacttgttataatttctgttcttttgtatttgctgaggagtgctgtacttccaactacgttgtcaattttggaataggtgcagcatggtgctgagaagaatgtatattctgttgatttggggtggagatttctgtagatgtctattaggtccactgggtgcagagctgaatttacttcctggatatccttgttacctttctctttcattgatctgtctattgttgacagtggagtgttaaagtctcccattattattgtgtgggagtctaagtctctttttcagttcactaaggacttgctttatgaatctgggtgctcctgtattgggtgcatatatatttaggatagttagctcttcttgttgaattgatccctttatcattatgtaatggcctgctttgtctcttttgatctttgttgatttaaagtccgttttatcagagactagcattgcaagctatgcctttttttgttttccattttcttggtagatcttcctccatccctttattttgagcctatgtgtgtctctgcacgtgagatgggtttcctgaatacaacacaatgattggtcttgactctttatccaatttgccagtctgtgtcttttaattggaacatttagcccattttcatttaacgttaatattgttatgtgtgaatttgatcctgtcattatgatgttagctggttattttgctcagtagttgatgcagtttcttcctagcatcaatggtgtttacaatcagccatttttctgccatggctggtactgatttttcctttccatgtttagtgcttcgttcagcagctcttttagggcaggcctggttgtgacagaatctctcagcatttgcttgcctgtacaggattttatttctccttcacttatgaagcttagtttggctggatatgaaattctagtttgaaaattcttttctttaagaatgttgtttttctcaggtttgtcaaagatcagatagttgtagatatgtggctttatttctgaggactctgtcctgttccattgatctatatctctgttttcgtaccagtaccatgctgttttggttactgtaaccttgtagtatagtttcaagtcaggtagtgtgatgcctccagctttgttttttggcttagggttggcttggcggtgtgggctcttttttggttctatatgaactttaaagtagttttctccaattctgtgaagaaagtcattggtagcttgatgggaatggcattgaatctgtaaattaccttgggcagtatggccattttcacgatattaattcttcctacccatgagcatggaatattcttccaattgtttgtatcctcttttatttccttgagcagtggtttgtagttctccttgaagaggacattcacatcccttgtaagttggattcctaggtattttattctctttgaagcaactgtgaatgggagttcactcatgattaggctctctgtttgtttgtctgtcattggtgtatgagaatgtttgtgatctttgtacattgattttgtatcctgagactttgctgaagtttcttatcagcttatctttgacaaaactgagaaaaacaagcaatggggaaaggattccctatttaatacatggtgctgggaaaactggctagccatatgtagaaagctgaaactggatcccttccttacaccttatacaaaaatcaattcaagatggattaaggacttaaacgttagacctaaagccatcaaaaccctagaaggaaacctaggcaataccattcaggacataggcatgggcaaggacttcatgtctaaaacaccaaaagcaatggcaacaaaagacaaaattgacaaatgggatctaattaaactaaatagcttctgtgcagcaaaagaaactaccatcagagtgaacaggcaacctacaaaatgggagaaaattttcgcaacctactcatctgacaaagggctaatatccagaatatacaatgaactcaaaccaatttacaagaaaaaaaacaacaacgctatcaaaaagtgggcaaaggacatgaacagacacctctcaagagaagacatttatgcagccaaagaacacatgaaaaagtgctcaccatcactagccatcagagaagtgcgagtcaaaaccacaatgagatacgctctcacaccagttagaatggctatcattcaaaagtcaggaaacaacaagtgctggagaggatgtggagaaatgggaacacttttacactgttggtgggactgtaaagtagttcaaccattgtggaagtcagtgtggcgattcctcagggatctagaactagtaataccatttgacccagtcatcccattactgggtatatacccaaaggactgtaaatcatgctgctttaaagtcacatgcacacatatgtttattgcggcattattcacaatagcaaagacttggaaccaacccaaatgtccaacaatgatagactggattaagaaaatgtggcacatatacaccatggaatactatgcagccataaaaaatgatgagttcatgtcctttgtagggacatggatgaaattggaaatcatcattctcagtaaactatggcaagaacagacaaccaaacaccacatattctcactcataggtgggaattgaacaatgagaacacatggatacaggaaggggaacatcacactctggtgactgttgtggggtggggggagggggaggatagcatttggagatatgcctaatgctagatgacgagttagtgtgtccagcacaccagcatggcacatgtatacatatgtaactaacctgcacattgtgcacatgtaccctaaaactttaagtataataataaataaataaaaagattaaaaaaaagagaatgttgaatattagcccccactctcttctgtcttgcagagattctgctgacagatcagcttttagtctgatgggcttccctttgtgggcaacccgacctttctctctggctgcccttaacattttttctttcatttcagctttggtgaatctgacaattatgtgtcttggagttgctcttctcgaggagtatctttgtggcactctctgtatttcccaaatgtgaatgttggcctgccttgctagattggggaagttctcctgggtgatatcctgcagagtgttttccaacttggttccattctccctgtcactttcagttacaccaattagacatagatttgttctttcacgtagccccatatttcttgg

SEQ ID NO: 250 - DNA, 8895 bp, Homo sapiens
acgtgcagcgcgctgcgcgccaacgcgcgcatcacgggcacctcctcgcagaggacggacgtcaggtacggagggaccctcaagctggactgcagcgcctcgggggatccctggccgcgcatcctctggaggctgccgtccaagaggacgatcgacgcgcttttcaggtaggcagctccgcgtggcttcctgtaaatcgctgggctggtggccccaacgaatataagtccttgttcaggatgaatatgcacacacattggtccctgcgtgcgataaaattaaatgaaattaattagcaggacacggtggctcacgcctataatcccagcactttggggccaaggcgggcggatcagttgaggtccggagttcgagaccagcttggctaacatggtgaaaccctgtctcaacaaacatacaaaaatttgccggacgtggtggcgagcgtctgcagtcccagctcctcgggaggctgaggtaagataattgcttgaacccagaaggtggcggttgcagtgagccaagatcacgccactgcacgccagcctggacgacagactgacactctatctaaaaataataataagttaattaattaagttgagacagggtgttgctctgtcacccagactgcagtgcagtggtgcgatcatacctcactgcagcctcaaactcctgggctgaagcgatcccctgagtagctgggattacaggtgtgcaccatgaggcacgactcttcttcttcttcttcctcttctccttcttcttcttcctcttcttcttcttttcttctttcttcttcttcttcctcttcttcttcctctccttcttctccttcttcttcttcctttcttcttcctcttcttcttcttttctttctttctttttctttcttcttctttcttcttcttcctcttctttcttcttcttttcttctttcttcttcttctccttcttcttcttcttcttcttcttcttcttcttcttcttcttcttcttcttcttctttcttctctcttcctcttcctattcttcttcttctttcttcctcttcctcctcttcctcttcctcttcttcttctttcttcaatttatgtagagatgggatctgctatgttgccaagtatgatcttgaacacttaacctcaagcagtcctcctgccctgacctaccaaagtgctgagatgacaggcttgagccaccgcgcctgaccctgtgtgtgatttttatgcaatgacattttgtatctctaaacttggatctacaacgaatgcttaacttcctcttaacaaatacttaacttcctcctctcttgtcccattcaaaaaaaaaaaaaaaggaaaaaaataaatcaagaaactgttgttttaatgattatatgtttaactataatgttagggcaaacaattcagcttgcttctatttccattgtagatttcaacaatatacatagatgtgttaggctttattttaatatggcattattggtacaatcaaagtgtacacattgttttaaaagcatcattaccacaccaacatagtgcacttgaaatgatacaaatgtacttgggctatgaagaaagccaccttctaatcaagtaccatcagttcccagatatacaggtttatggcagtgcttttcaaccaagggtgattttgccccaggacaacccttggcaacatccgaagacacctttgattatcacaaatggggcggtgggtgcttctggtatctggtgggtggagcccagggacagtgctcaacaccttgcagtgcacaggatggcccatcacagatagtcatccatcctaccttcaatgtccatagtgccgaggtcaagttactctgtcttagcaggaaagattctatctatctatctgtctatctatctatctatctatctatctatctatctatctatctaatctataatctatccatccttctacctatttcatctatcttctatctatctatctatctatctatctatctatctatcatctctctgtctatccatccattatctatggcagtcgtttgcaaccaggcatcaggtgttccttagtccctaggggacacttggtgatgtatggagacatttttggtcatcatgactctggggtggagggtgtgcttctggtatctggttgctgcagccctgggatcctgctcaacatcctacagtgcacaagacaccccaccacagattagcattcatcttgccttaaatgttaatactgctgaggtcaagtaaccctgtcttagcatgtaagattttgtctgtccatttagctatctatttatccattcattcattcctgtatacctaacctatcatccatccttatctcttgtgtatctattcattcaatcatacacccatatctgtctgtctgtctatctatctatctatctatctatctatctatctatctatctatctgcctatctgcctgcctacctatccctctatggcaattgcttgcaaccagggagattttattcccaggagatatttggctatgtctgacaacaatttttttggttgtcacaaatgggatgaatgttactggcatctggtgggtggagcccagagatgctgctcaacaccctacagtgcacaagacagacccaccacaaagaatcctccatacagccttaaatgtccctagtactgaagccaagaaaccctatcttagtatgaaaatgttggtctatctgtctatatacctgcttatctatccatccatttctatctacctaacctatccatccatccattctaatgtcttatgtatccatctattcatccatccacccatctctccatccatttatccatccatccatcgatatgtatgtatgtatgtatgtatgtatctttctatctatctatctatctagtctgtctactgatctagctagctagctagctatggtagttgtttgcaaccaaggagattttactcccaggagacatttggctgtgtctggaaacattttttggttgtcacagatgggatggatactgctggcatctggtggatggagtccagggacattgctcaacaccctacagttcataggttggccccatcacagagaatcatctaggctcaaatgtcactagtgccaaggttgagaaaccctgagctagattcaaaaaagggctaatatctctttaataagtgtgtcaaaaaatagaggacactgacagtagagtaaaggtaaaatggagtccaactcagttcacgctgctatggtggagaatccctggattgtgctgtcttcggcattcagcagctcaagcaggaaagcctctcaccatggtgagagcaaaatcagtgtccaagggtttcttctgcacatttgtatctgcccttctaggactctttgcagttcaggaaaagggctgagatgcctttcccctgcctgtattttatactttagatggctgggtggtgctctgaagagcttgcacaatcagtccagaagaatcatgtaccaaatatacccaggaatgccttccagcttagcagatgtgctgccactaagaaaactgttttccattgaatttggcatggtggaggcaattttgaatggataacagtacaagaatgcagttccactaggatttttgagtcattctattaatatctccatataaatcctaaataaattataaactgttatttatgttactttattctttgtaaattctgactatattcttagtaaagtgtaattgaacaaatcatgtgcattttgtcagagcaggctcttccctgcctacatgttgggattatttaaaaataaaaatatagggccttgtgtgatgcctgacacctgtaatcccagcactttgggaggccaatgtgggtggattgcttgaggtcaggagttcaagaccagcctgaccaacatggtgaaaccctgtctctactcaaaatacaaaaattagcagggcatagtgcacatgcctgtagtcccagctacttggaagcctgaggcaggagaattgcttgaacccagaaggtagaggtttcagtgagccaagatcaggccactgcactgcagcctgggtgacaaagtgagactccatctcaaaaaacaaaaagaaaaacaagtatcagagctttgtttcttgaagtcaaatccctcacaatgcatagacatctgtggctttcagatttgctcagttgatttattctgatgaaaactggattaggggtcactgttacggaagccatagaacgtttacatacacatgctaccataatcatttttggattcaaactccaagacacattaaaatgtgcttgcctgccccacagctattaaattccttactgagttacattgacttcattctcactcataacccacaaaacagtatattttgtcattgttaattgttgcttttattacaatgattaggttgaatgtaagcacaagcaggctcatttttgttaagatctatgacattgtcttagacatgtcattagaaaaatggaatgttgccacatgtggtggcacatgcctgtattcccagcactttgggagatgagcagaaggatcacttaagtccaggagttcaaaaccagcccagacaacatagcaaaatcctgtctctacaaaaaaacaaaaacaaaaaagcaaaaaacaaacaaacaaacaaacaaacaaacaaaaaaacacctccagccaggcataggcatattggtatatggttatagtccaaactactcaggaggctgagataatagggtcccttgagtccaggagatcaagactacagttagctatgattgcaccactgcactccaccctggatgacaaagcaagatcccaattcttcagaaaaaaaagaaagtgtggcatttaggaaatattaaggctcccattacaatgtatgtgtcatggaggattcaacagggacaattttaaaagtgagaactttctcaatcttttcactggattatccaacatgctagttctgaataactaaaggatacttcagtatttatgaaactgttacatatataatgaagattttcctatcatcctttctaggttgcctctattaaactgtttgtaattattaactcagcagtgcttagacttcatggggaagaatggtacaccagccttggggtcttagctagtgagtgttattcagctttaattacaaattctagaaaacccgttacaccaatattgccaacttctgaagagcccaattttagccttggaactctgggcataaccataattacatgaccttagagttgctttttctgactcttgcccaaaactgggatacaacagcttaaaaaaaaaattgccaaaagtagaaacagtgtctaaagcattttctccaggaagaaattaacatctttattaggctgactcagattcatcaccatctccatgactgcagcattttatctgattttgtttttacattgacctctgcaatgactaccatgcaaatacttgatccagacacacttgcaggaataggactgacatctttgactacatttcatgtccttgaacccatggtcaggccaacctaacatcagatttaacagggagttgttatttgcagtcaatcactttccacaatcttctccaggctgtaaaaaccattgggcattttgcaatagcagccacgtgggctgatgcatcacagaaatacctattttttgtgttattccagtgacataacgccatggtagagtatttgggaaactgacatcttaattgtttttctttttttctgtagttttgatagtagaatcaaggtgtttgccaacaggaccctggtggtgaaatcaatgacagacaaagacgccggagattacctgtgtgtagctcgaaataaggttggtgatgactgcgtggtgctcaaggtggatgtgatgatgaaaccggccaagattgaacacaaggaggagaacgaccacaaagtcttctacaggggtgacctgaaagtggactgtgtggccactggacttcccaatcccgagatctcctggagcctcctggatgggagtctggtgaactccttcatgcagtcagatgacagtggtggacgcaccaagcactatgtggtcttcaacaatgggacactctacttcagtgaagtggggatgagggaggaaggagactacacctgctttgctgaaaatcaggttgggaaggatgagatgagagtcagagtcaagatggtgacacctgccaccatctggaacaagacttacttggcagttcaggtaccctatggagatgtggtcactgtaacctgtgaggccaaaggagaacccatgcccaaggtgacttggttgtccccagccaacagggtgatccccacctcctctgagaagtatcagatataccaatatggcactctccttattcagaaagcccagtgctctgacagcggcaactacacctgcctggtcaggaacagtgccggagaggataggaagacagtgtggattcacgtcaacctccagccacccaagatcaatggtaaccccaaccccatcaccaccgtgtgggagatagcagccgggggcagtcggaaactgattgactgcaaagctgaaggcatccccaccccgagggtgttatgggcttttcccgagggtgtggttctgccagatccatactatggaaaccggatcactgtccatggcaacggttccctggacatcaggagtttgaggaagagcgactccgtccagctggtatgcatggcacgcaacgagggaggggaggcgaggttgatcgtgcagctcactgtcctggagcccatggagaaacccatcttccacgacccgatcagcgagaagatcacggccatggcgggccacaccatcagcctcaactgctctgccgcggggaccctgacacccagcctggtgtgggtccttcccaatggcaccgatctgcagagtggacagcagctgcagcgcttctaccacaaggctgacggcatgctacacattagcggtctctcctcggtggacgccggggcctaccgctgcgtggcccgcaatgccgcgggccacacggagaggctggtctccctgaaggtgggactgaagccagaagcaaacaagcagtatcataacctggtcagcatcatcaatggtgagaccctgaagctcccctgcacccctcctgcagctgggcagggacatttctcctggacactccccaatggcatgcatctggagggcccccaaaccctgggacgcgtttctcttctggacaatggcaccctcacggttcgtgaggcctcggtgtttgacaggggtacctatgtatgcaggatggagacggcgtacggcccttcggtcaccagcatccccgtgattgtgatcgcctatcctccccggatcaccagcgagcctaccccagtcatctacacccgtcccgggaacaccgtgaaactgaactgcatggctatggggattcccaaaggtgacatcacgtgggagttaccggataagttgcatctgaaggcaggggttcaggctcgtctgtatggaaacagatttcttcacccccagggatcactgaccatccagcaggccagacggagagacgctggcttctacaagtgcacggcaaaaaacattctcagcagtgactccaaaacaacttatatccatgtcttctgaaatgtggattccagaatgattgctcaggaactgacaacaaagcggggtttgtaagggaagccaggctggggaatcagagctcttaaataatgtgtcacagtgcatggtggcccccggtgggattcaagttgaggttgatcttgatctacaattgttgggaaaaggaagcaatacagacatgagtaaaagggctcagcctcactgagaactttcttttgtgtttacatcatgccaggggcttcattcagggtgtctgtgctctgactgtaatttttatttttttgcaaatgtcattcgactgcctgcgtaagtgtccataggatatctgaggaacattcaccgaaaataagccatagacatgaacaacacctcactcccccattgaagatgcatcgtctagttaacctgctgcagtttttacatgatagactttgttccagattgacaagtcatctttcagttatttcctctatcacttcaaaactccagcttgcccaataaggatttagaactagagtgattgttatatatataaattatatatatataaattaaatttatatatatataatttatatataatatatatattttaattcagagttacatacatacagctaccattttatatgaaaaaaacatttcttcctggaacccactttttatgtaatttttttatataaatatttttcctttcaaatcagatgatgagactagaaggagaaatactttctgtctcattaaaattaataaatgattggtctttacaagacttggatacattacagcagacatggaaatagaattttaaacaattcctctccaacctccttcaaattcagtcgctactgttatgttactttctccagcaaccctgcactggggaaggctgtgatattagatttccttgtatgcaaagtttttgttgaaagctgtgctcagcggaggtgagaggagaggaggagaaaactgcatcatatctttccagaattgaatctagagtcttccctggaaagcccagaaacttctctgcagtatctgacttgtccatctggtctaaggtggctgcttcttccgcaaccatgagttagtctgtgtccatgaataatacaagatctgttatttccatgactgctttactgtaattttagggtcaatatactgtacatttgataataaaatatattctcccaaaaa

SEQ ID NO: 251 - DNA, 4696 bp, Homo sapiens
ataaaaatacaacataacaaaacttttgtggtgcagcaaaagtgattaaagggaaaatgcagaaccagtggatacagaaggctgactgtacgatattaaaagcaaaaaaaaccccaccaaaactgagaatgagctattgatacgtgtaacaacgtggataaactgggaaaaccacactgaagaaatgaaagcagaccctaaagcaaatatgtttggttccagttatacgatgcacagaacctgacaatacaggtattgccttcttgtatatggacagaaggagaatcacttgaacctgggaggcagaagttgcagtgagctgagattttgccattgcactccagcctgggcaacaagatagaaactctgtctcaaagaaaaaaaaaaaagacataatttttgtctacaaactctcacagaggcattaaagagtaaaatcagttatgttgtattgtttcataaaagttttacttattttgtaacaattgtattggataataatcacaatgaggtagagttttaactggaaaacaaatgctgcctctctgtgcctatatggatagggaagctgaggagaccagaaattcaagtgttaagaaggtaacttttggcagccaggcacggtggctcatacctgtaatgccagcactttgggaggccaatgcagtggattgcttgaggtcaggagttcgagacctggccaacatggtaaaaccccatctctactaacatacaaaaaaaaaaaattaactggatgtggtggcaggcacctgtaatcccagctactagggaggctgaggcaggagaattgcttgaaccccagaggtggaggttgcagtgaacggagattgtgccactgaactccagcctgtgcaacagagtgagactctgtctcaaaaaaaaaaaaaaaaaaaaaaggtaacttttgggtaatgggtaatgggggtataagaccgaaagtacattcccttcacagggctggagatggtggatggagagggaagagaagggcaggtggagaggggatggggtgcagatggggatgcaggtgtggtggggcaagactcacaagcagaggggaataagtagaaggggtatggggcaggaaggaaaagaggggtagtcagtgggatgtgagcttccagaaagaagctgacagtgatgtcctgcatgtgtcccacagggctaagtgtccacacctcagttctgtcttgagcgggaggggctcagccaggcctctcagccctgctctgctgggggcctccacacctgcagagccaacatgggcctcagatcagcaccagccacttcagttctaattccaggtggggctgagctgtcctggggcaggacagctcagccccacctggaactcaggagcttcctggagacaggcagtccggctcacctggtatagtagatccaggtgaggccataggtgaggaggaagccagcccccatgagagcccccctgatcagggtgaggacgaggggccaggagccctgctgtttctcagttacacatatgcaggaagaggagcttcctgggagaaaggagaaggtaaggtgctgttaccaggcctcagtccctcccaccaacctgaatacctcaccgggctgtctaccctcagcacctgtcctgcaactcactctgcacagaaaggatgaaggacaggtgctgggagcccagcggatgctgaacccggcaggtgaattcccctccctctctagctcctatgttaggcagctccagggtcccagacattgaggtctgggaaggattgagggcttttccctcccggaaccagctcagtgaggcaggggggttgctgtcaactgtgcaggcgaggaacagggactggccctcctggatgggcaccgacatgccattgctcaggatccgcagggctgggaaagagaagcacagccaggtgagtggagctgggaggcccaattctccctcattcctcccactgagctgcaagaagaaagacaagactgtgtggtgagtgctgagaatgggctagtcatgggtgaaaggatgaggacttggtgatcaggtcaggctaccagaaagaaggtggctgagctgagaaaagacagatgaggaggagttctcacattaaggagaagtggatgggcagctcaggtgcagacgtgccaagaactgagacaggcagacgaggaaagaggctcctagatccgcaacctgtcagggaggacccagagctcccaagacacgataatggaggtagaagcaggctcagatcttttggagcattgggtgccagattgagggccttgggctttatcctggaaagcaagagggggctataagcaagggaaacagagttagcactggatctagaaagatcctgctggagccaagtaggtcccggactggagagaagtgggataggaggcagggaggctgggaggaggctggggcaatgggccagggttgagcacgagacttgagctgggcctggaaccaaggggatgaggagggaagtgatgattggtgaagtaaaggtgttaagacttgcggactcatgaaacagctgatgagaaagggtgctgtctacagcgatgtccagaacagccctgggatcaacagggaaggaggagccgagaagcatccgagggaggtggctaaatgtgcagatctgtgcctcagagaaagggctggatataaagttgtgggaggcatcaggacagggtcaaggagagatcggattactcaggaatgtggaggggaagaactgggttctgggacagagctgtgggaggtgggaaagtcgaaggctcccaaaaaggacgatcagttagagatgaagcagggcatgcatcagaggacatcggagcaggcagaaattcaagaaaagggaacagcgtgtcctgagtactcaaactcacagagacagaaaagtagaatggtgactgctcggtggcaggagggggaagtggaaagtcgctgttcagtgggtacaaagtttcagttttgccagataaaaggagctctgcagtttggttttgcaacaatgtgaacacatttaacactgctgaactgtactctttaaaatggctaagatgacaaattttgtgctatgtgtattttctcacaatgaaaaaataaatctgaaaaagagagcagagaaaagggagaagccaaaagaaatactaggtctgttcgtgcaagatcttagtgactgggattggggggttgggagcaggaaggacccagacccaggggctgaggggtgagggagggtctcctctcccaatgctgaaccctgagctaatagaaggctcccatcacagccccagagggaagagggtctttcctacctgtgcctgtgccatttctgaagaagatgctgatggcgaggttctgtggagcatctgggatagaaagatacagcaccagcttcagaggtgacaagagggatgggcgtggtcccgggagggacccaaggaggggccacagaaacccaccaggtggggaccgctgtccttcctgcccacacacgagttttccctggttatcattctctttctctctctctcttctacacacacacacacacacacacacacacccccctcactcccactgcccttggggactcagctgtgtccccagcaccactcacaggagacattgagctggacagttctctccgtggtcacctgagctccttggcgtttcacctgacaggtgaggttggtgccatggtcctcgggcctgggggtgagggtgagctccgaggagcgggtggtctcggggtccagggggctgagggcattccccgtccaggagaatgtgagaggtggtcccgcttcacaggatcctggaaggctgcagctcagccttgtggggcggccggactccagaggctccagaaagtggatgtcgggtttctctatcagggctgaggaggagacagggagatacctgggccccaggggcttgaggacgtaaggtgtgaccccgagagtggccaggcctcaggccccgacctgccccaagtcctacacctcctccagccgcccctgcccaactcctgtccctgttctcatacgggggtctccacgtcccagggtcctctcctagggttcctgccatacctgtcacctccaagttcagcttattctgttggtagctatattttacatcccttcctctctccacgcggaagaaatagcttcccgtgtcctccattctggcatctccgatgctcagggagcagttcttcttctggacatccccaaggaggcggaatcggccctgggtctctggcttcactcttctgtctgggttgtttgtggccacaacctcagcgtagtatgggatctccccgtcccggaaccagtagacgtagagtgggggagaggaataccaggatctccaggggtaagagaaggagcagggcacaaggacgcacaggccctcctgcaccgtcaccgacttctgcacttgcagctcgtacactggcttctcctgcagggaccctggggggacacagaagctcagctgcagctccagccccccttctcacccctgtgcctgtccctcctccctcagctcactcacccccccacagcaggggcagcagcagcaggggcagcatgtctccatccgccagggccccagcccagtcccaggtccggctgtcagggaaggaaatgctccaaa

SEQ ID NO: 252 - DNA, 387 bp, Homo sapiens
aaagactctcacggttggtgaaagtgaaagttagttcagccattgtggaagacagtgtggcgattcctcaaagacctaaacatagaaataccattcgactcagcaatcccattcctaggcatatacccaaaggaatataaatcattctattacaaagacacatgcatgcatacattcactgcagcactattcacaatagcaatgacatggaatcaacctaactgcctatcagtggtagactggatagagaaaatgtggtacatatacaccatggaatactaagcagccataaaaaagaatgagattatgtcctttgcagggacatgagtggagctggagaccattatcctcagcaaactatcacaagaagagaaaaccaaataccac

SEQ ID NO: 253 - DNA, 310 bp, Homo sapiens
ggccgggcgcagtggctcacgcctgtaatcccagcactttgggagaccgaggcgggtggatcacgaggtcaggagatcaagaccgtcctggctaacatggtgaaaccccgtctctactaaaaatacaaaaaattagccgggcgtggtggcgggcgcctgtagtcccagctactgggggggctgaggcaggaggacggcgtaacccgggaggtggagcttgcagtgagccgagatcgcaccactgcactccagcctgggcgacagagcgagattccatctcaaaaaaaaaaaaaagaaaagaaaagaaaaa

SEQ ID NO: 254 - DNA, 348 bp, Homo sapiens
cccacaccaggctgggtgtcggggtccccgcggcagagcagttgaggctgatggtgtggccgccatggccgtgatcttctcgctgatcgggtcgtggaagatgggtttctccatgggctccaggacagtgagctgcacgatcaacctcgcctcccctccctcgttgcgtgccatgcataccagctggacggagtcgctcttcctcaaactcctgatgtccagggaaccgttgccatggacagtgatccggtttccatagtatggagctggcagaaccacaccctcgggaaaagcccataacaccctcggggtggggatgccttcagctttgcagtcaatcagtttccg

SEQ ID NO: 255 - DNA, 9656 bp, Homo sapiens; identical to SEQ ID NO: 246

SEQ ID NO: 256 - DNA, 8895 bp, Homo sapiens; identical to SEQ ID NO: 250

SEQ ID NO: 257 - DNA, 9765 bp, Homo sapiens; identical to SEQ ID NO: 248

SEQ ID NO: 258 - DNA, 1884 bp, Homo sapiens
tttttgggagaatattattttattatcaaatgtacagtatattgaccttaaaaatacagtaaagcagtcatggaaataacaggtcgtgtattattcatgggcacaaactgactcatggctggggaagaagcagccaccttagaccagatggacaagccagatactgcagagaagtttctgggcttttcggggaagactctagattcaattctgtaaagttatgatgcagttttctccttcctctcctctcacctcctctgagcacagctttcaacaaaaactttgcatacaaggaaatctaatatcgcagccttccccactggagggttcctggagaaggtaatataacagtggtgactgaatttgaaggaggttggagagaaattttttaaaattatatttccatgtctgctgtaatgtatccaagtcttgtaaagaccaataatttattaattttaataagacagaaagtatttctccttctagtctcatcgtctgatttgaaaggaaaaaatatatatataaaacattatataaaaagtgagtccaggaagaaatgtttttcttttttcatataaaatggtagctgtatgtatgtcactctgaattaaaatatatatatatatcagtcactctggttctaaatccttattgggcaagctggagttttgaagtgacagaggaaataactgacagatgacttgtcaatctggaacaaagtctatcatgtcacaactgcagcaggttaactaggtgatgcgtcttcaatggggtagtgaggtgttgttcatgtctatggcttatctctcatgaatgttcctcagatatcctatggacgcttatgaaggcagtcgagtggcatttgccaaaaaagaaaaattgcagtcagagcacagacaacctgaatgaagcacctggcatgatgtaacacaaaagaaagtgtctcagcaaggctgagcgctccttctcgtgtctgcattgcttccttttcccaacaattgtagatcaagatcaacctcaacttgaaacccaccagaggccaccatgcactgtgacacattatttaagagctcctattccccaacctggcttcccttacaaaccccgctttgttgtcagttcctaagcaatcattctggaatccacatttcagaagacgtggatgtaagttgttttggagtcactgccgagaatgttttttgccatgcacttgtagaagccggcatctctctgtgtggcatgctggatggtcagtgatccctgggggtgaagaaatctgtttccatacagacgagcctgaacccctgccttcagatgcgacttatccggtaactcccacgtgatgtcagctttgggaatccccatagccatgcagttcagtttcacggtgttcccgggccgggtgtagatgaccggggtgggctcgctggtgatccggggaggataggcgatcacaatcacggggatgctggtgaccgaagggccgtactccgtctccatcctgcatacataggtacccctgtcaaacaccgaggcctcacgaaccgtgagggtgccattgtccagaagagaaacgcgtcccagggtttgggggccctccagatgcatgccattggggagcgtcaggagaaacgtccctgcccagccccgggaggggtgcaggggagcttcagggtctcaccattgatgatgctgaccaggttatgatactgcttgtttgcttctggcttcagtcccaccttcagggagaccagcctctccgtgtggccagcggcattgcgggccacgcagcggtaggccccagcgtccaccgaggagagaccgctaatgtgtagcatgccgtcagccttgtggtagaagcgctgcagctgctgtccactctgc

SEQ ID NO: 259 - DNA, 25395 bp, Homo sapiens; identical to SEQ ID NO: 249

SEQ ID NO: 260 - DNA, 602 bp, Homo sapiens; identical to SEQ ID NO: 247

SEQ ID NO: 261 - DNA, 25393 bp, Homo sapiens
ttttcttttttttttttttaattatactttaagttctagggtacatgtgcacaatgtgcaggttagttacatatgtatacatgtgccatgctggtgcgctgcacccactaactcgtcatctagcattaggtatatctcccaatgctatccctcccccctacccccaccccaaaacagtccccagagtgtgatattccccttcctgtgtccatgtgatctcattgttcaattcccacctatgagtgaaaatatacggtgtttggtttctctttcttgcgatagtttactgagaatgatgatttccaatttcatccatatccctacaaaggacatgaactcatcattttttatggctgcatagtattccatggtgtatatgtgccacattttcttaatccagtctatcattgttggacattttggttggttccaagtctttgctattgtgaataatgccacaataaacatacgtgtgcatgtgtctttatagcagcatgatttatagtcctttgggtatatacccagtaaggggatggctgggtcaaatggtatttccagttctagatccctgaggaatcgccacactgacttccacagtggttgaactagttgacagtcccaccaacagtgtaaaagtgttcctatttctccacatcctctccagcacctgttgtttcctgactttttaatgattgccattgtaactggtgtgagatggtatctcattgtggttttgatttgcatttctctgatggccagtgatgatggacattttttcatgtgttttttggctgcataaatgtcttcttttgagaagtgtctgttgatgtccttcacccactttttgatggggttgtttgtttttttcttgtaaatttgtttgagttcattgtagattctggatattagccctttgtcagatgagtaggttgtgaaagttttctcccatgttgtaggttgcctgttcactctgacggtagattcttttgctgtgcagaagctctttagtttaattagatccaatttgtcaattttgtcctttgttgccattgcttttggtgttttagacatgaagtccttgcccatgcctatgtcctgaatggtaacgcctaggttttcttctagggttttgatggttttaggtctaatgtttaagtctttaatccatcttgaattgatttttgtataaggtgtaaggaagagatccagtttcagctttctacatatggctagccagttttcccagcaccatttattaaatagggaatcctttccccactgcttgtttttctcaggtttgccaaagatcagatagttgtagatatgcgacattatttctgagttctctgttctgttccattgatctatatctctgttttggtaccagtaccatgctgttttggttactgtagccttgtattatagtttgaagtcaggtagtgtgatgcctccagctttgttcttttggcttaggattgatttggcgatgtgggctcttttttggttccatatgaactttaaagcagttttttccaattctgtgaggaaagtaattggtagcttgatggggatggcattgaatctgtaaattacctttggcagtatggccattttcacgatattgattcttcctacccattagcatggagtgttcttccatttgtttgtatcctcttttatttccttgagcagtggtttgtagttctccttgaagaggtccttcacataccttgtaagttggattcctaggtattttattctctttgaagcaattgtgaatgggagttcactcatgatttggctctctgtttgtctgttgttggtgtataagaatgcttgtgatttttgtacattgattttgtatcctgagactttgctgaagttgcttatcagcttaaggagattttgggctgagacaatggggttttctagatatacagtcatgtcgtctgcaaacagggacaatttgacttcctcttttcctaattgaataccctttatttccttttcctgcctaattgccctggccagaacttccaacactaggttgaataagagtggtgagagagagggcatccctgtcttgtgccagttttcaaagggaatgcttccagtttttgcccattcagtatgatattggctgtgggtttgtcatagatagctcttattattttgaaatacgtcccgtcaatacctattttattgagagtttttagcatgaagagttgttgaattttgtcaaaggccttttctgcatctattgagataaacatgtggtttctgtctttggttctgtttatatgctggattacatttattgatttgtgtaaattgaaccaggcttgcatcccagggatgaagcccacttgatcatggtgaataagcttattgatgtgctgctgggtttgttttgccagtattttattgaggatttttccatcaatgctcatcaaggatattggtctaaaattctctttttttgttgtgctctgcctggctttggtatcaggatgatgctgtcctcataaaaagagttagggaggattccctctttttctattgattggaatagtttcagagggaatggtaccagttcctccttgtacttctggtggaattcggctgtgaatccatctggtcctggactctttttggttggtaaactattgattattgccacaatttcagatcctgttattggtctattcataggttcaactttttcctggtttagtcttgggagagtgtatgtgtccaggaatttatccgtttcttctagattttctagtttatttgcatagtggtgtttgtagtattctctgatggtagtttgtatttctgtgggatcggtggtgttatcccctttatcattttttattgcatctatttgattcttctctcttttttctttattagtcttgctagcagtctataagttttgttgatcctttcaaaaaaccagctcctggattcattaattttttgaagggttttttgtgtctctatttccttcagttctgctctgattttagttatttcttgccttctgctagcttttgaatgtgctcttgcttttctagttcttttaattgtgatgttagggtgtcaaatttggatctttcctgctttctcttatgggtatttagtgctataaatttccctctacacactgctttgaatgtgtcccagagattctggtatgttgggtctttgttctcgttggtttcaaagaacatctttatttctgccttcatttcgttatgtacccagtagtcattcaggagcaggttgttcagtttccatgtagttaagcagttttgagtgagattcttaatcctgagttctagtttgtatgcactgtggtctgagagatagtttgttataatttctgttcttttacatttgctgaggagagctttacttccaagtatgtggtcaattttggaataggtgctgtggtgctgaaaaaaatgtatattctgttgatttggggtggagagttctgtagatgtctattaggtccgcttggtgcagagccgagttcaattcctgagtatccttgttgacttgctgtctcgttgatctgtctaatgttgacagtggggtgttaaagtctcccattattaatgtgtgggagtctaagtctctttgtaggtcactcaggacttgctttatgaatcttggtgctcctgtattgggtgcatatatatttaggatagttagctcttcttgttgaattgatcactttaccaatatgtaatggccttctttgtctctttttatctttgttggtttaaagtctgtattatgagagactaggattgcaacccctgcctttttttgttttccatttgcttggttgatcttcctccatccttttattttgagcctgtatgtgtctcgcacgtgagatgggtttcctgaatacagcacactgatgggtcttgattctgtatccaatttgccagtctgtgtcttttaattggagaatttagtccatttacctttaaagttaatattgttatgtgtgaatttgatcctgtcattatgatgctagctggttattttgattgttagttgatgcagtttcttcctagtcttgatggtctttacaatttggcatgattttgcagtggctgttactggttgttcctttccatgtttagcgcttccttcaggagctcttttagggcaggcctgatggtgacaaaatctctcagcatttgcttttctgtaaagtattttatttctcctttgcttatgaagcttagtttggctggatatgaaattctgggttgaaaattcttttctttaagaatgttgaatattggcccccactctcttctggcttgtagggtttctgccgagagatccgcttgaatctgaacattggccttccttgctagattggggaagttctcctggataatatcctgcagagtgttttccaacatggttccattctccccatcactttcaggtacaccaatcaggcgtagatttggtcttttcacatagtcccatatttcttggaggctttgctcatttctttttattcttttttctctaaacttcccttctcacttcatttcattcatttcaccttccagtactgatgccctttcttgctgttgatcacatcggctcctgaggcttctgcattctttacgtagttcttgagccttggttttcagctccatcagctcctttaagcacttctctgtattggttattctagttatacattcttctaaagttttttcaaagttttcaacttctttgcctttggtttgaatgtcctcccatagctcagaataatttgattgtctgaagccttcttctctcagctcgtcaaagtcattctccgtccagttttcttctgttgctggtgaggaactgcattcctttggaggaggagaggctctctgctttttagagtttccagtttttctgttctgttttttcgccatctttgtggttttatctacttttggtgtttgatgatggtgatgtacagatgagtttttggtgtggatgttctttctgtttgttagttttccttctaacagacaggacactcagccgcaggtctgttggaatacccggctgtgtgaggtgtcagtctgcccctgctgggtacctcccagttaggctgctcgggggtcaggtgtcagggacccacttgaagaggcagtctgccccttctcagatctccagctgcgtgttgggagaaccactgctctcttcaaagctgtcagacagggacatttaagtctgcaaaggttactgctgtctttttgtttgtctgtgccctgcccccagaggtggagcctacagaggcatgcaggcctccttgagctgtggtgggctccacccagttcaagcttcctggctgctttgtttacctaagcaagcctgggcaatggcgggcgcccctcccccagcctcgctgccaccttgcagtttgatctcagactgctgtgctagcaatcagcgagactctgtgggtgtaggaccctccgagccaggtgcgggatataatctcgtggtgcaccgtttttttaagcccattggaaaaacgcagtattcaggtgggagtgacccaattttccacgtgccatctgtcaccccttcctttgactcggaaaggaactccctgaccccttgcgcttcccaagtgaggcaatgccttgccctgctttggctgccacacagtgcacgcatccactgacctgcgcccactgtctggcactccccaatgagatgaacccagtacctcagatggaaatgcagaaatcaccgtcttctgcgtcgctcacactgggagctgtagaccggagctgttgctattcggccatcttcaacaatgctattttcaaggacaaaagagggtcacattaatttgggtttccatcagagtggttgaaaaaactgctttcatcaccttctctcaatgattagcttctctacacatttttaacaggcaaggaaactgagtcaaaggcaatgcttctgatgacagatttggcaggcaggaaggcaggatttgagtgtcagttgcatgtagtgacaatttcagtattcagcaagacagcttggggactgagaagcagtgctctaggaaatcattcaggatttttcttttttatattgttttcaaagagacacctgtatatacatgtatttgtattccacaaatatgcaaaactgtccttcttttgcttcccctgagagtaaggaaaaaggcaaacaagataaatatttgggaaaaatattactgtcagcatttcaagaaatgcagtgtcacaaattgttaaagaatgtcggtcatggaaactaaagaatgctggtttatttttttttaactctgtggaaggcatagagcatgtctctcattcatgaatccacttatttgcttaaatatgtctgcacagcccttacttgtgctggatatcaacagagcctgaggaagcagagaggaggaggaggaggtggtgcttggagtgtttatgctcaatagactggttcttcagatggtgcagggtctctcaaaatgcccatgaatgacatttggggatggatgattctctgggcttgggtgtcctgtgtagggtgttgagaagtatccctgggctctacctgccacatgctagcatccccccacccccaaaaagttgtgatgaccaaaatgtctctggacattaccaaatgcccctttagagggtgcaaacttgctcctgagagccactgatgcggacagattagattggtaaatagataactgatagatgattgatatagatagataagtgatagatagatggtagacaggtgatagataaatgactggcagatacaaagagatagatgataggttgataatagatatagataggggacaaagattgatacagatagatgattgatagatataaatagatagtagatacagataggagtaagataggtagatagataatagatggttggatggaggatagatagataaatgatggatggataaatgatggatggttggatggatgatagatacacagataaataaatgatggatggttgggtggatgataggtatatagataaatagatgtatgtttggatgaattatagatagaagatagagtgacagataatgtatggttgaatagatgatcaataattggatagatacctatgtagatagactgatgacagatggttgggtggattagataggtagttgggtagatgatagatgtatagataaatagaagatgcatggttggataggtgatagatgaatggatggatgatagatgagagatgagagatagagatgagagatagatagatagagatgagagatagatacatacatacatacatacatacatacatacatacatacacagacaaataaatgagggttgactggatggataatagatagagtttctcatgctaaggatttctccgcctcagcagtatggacatctggggcaggaggattctctatggtgggactgtcctgtgcactgtagggtgttgagcagagtccctgggctccacccacaagatgccaggagcacgcaccaccccagtggacaaccaaaaatgtctctagatatggctacattccctgcataaggctgtacctttcctgattgcgaaacactgtgctaggtaaatacacgcagcagagggtttcagaaacatgttcatttggacagtcttcttcagtgcatgatgtggaaactgagatctggggaggtaagttcacctaggtgtagagaatgtttctgcaggacataccttggtaaaattttacctggaaaaaaattggcaaaaacatcctatcaacaaaaatttctgcattcacatgaggtgatgggctgaagaggtgtttggaaacattaaaagtgtttcagagagcattcagattctagaagattaaaaaaccaagtgggattgtagtcccatttaaaaagagctatatttttatgacttagatagcattttcactgagtcaagaatagaagaatggctgggcagaatgatatgaacaaatgagaggacgtgttctcctggccgcaaaaagatcatgaagaaagtgcgaccctcaagtaaagagacctggggtttagtaatagatataatgtaatagtggtgcaggcccgtagtcacagctactcaggaggctgagctaggaggattacttgagcccaggagtttgaggctgcagtttgcaaaaaaatcatttctacctgcaacctgtcagtgcaaccttatttgaaaaaagagtttttgcagatgtaatcatgtgaaggacctggaaatgagattattctggataaggatgggttctaaatgcaataagtgtgcctataagagacaaatcaggggacacagacacagaggaggaggccatgtggagacagaggcagaaaatggagtgacatggcccagggattcctggagcccccaggatctggaagaggtaggaaggatcctcccctggaacatccagagggaactgcatacaattgtagtgcattgaacagtggcccccaaaatatatgcccatattctgactcccagatcctgggaatgggaccttatttggaaatagggtctttgcaggtgtaattaagttaaagatcttgagacgagttcatcctggattagacgggctctaaatccaataataggtgtctgtcctaagagacaaaacaggaggaacagacacaggagaaggccttgtggagatggaggcagactggagtgatgcagccacaagcccagggacatctggagccccccaggagctgggagaggcaggaaggatcctcccctagagcctccatagggagcatggccctgagacactttgatgtcagacttctggtctccaaaactgagaaggagtccattctgtttttttttttttctttctgaaggtaacatatatttttatttcttttcttattattattatactttaagttttagggtacatgtgcacaatgtgcaggtttgttacatatgtatacatgtgccatgttggtgtgctgcacccattaactcatcatttagcattaggtatatcacctaatgctatctctcctctctccccacactccaaaacagtccccgatgtgtgatgttccccttccggtgtccatgtgttctcattattcagttcccacctatgagtgagaacatgcggtgtttggtttttgtccttgtgacagtttgctgagaatgatggtttccagcttcatccaggtccctacaaaggacacgaactcatcattttttatggctgcatattattccatggtgtatatgtgccacattttcttaatccagtctatcattgttggacatttgggttggttccaagtctttgctattgtgaatagtgccacaataaacatgcatgtgcatgtgtctttatagcagcatgatttataatcctttgggtatataaccaataatgggatggctgggttaaatggtatttttagctctagatcccagaggaatagccacaccaacttccacaatggttgaactagtttacagtcccaccaacagtgtaaaagtgttcctatttctccacatcctctccagcacctgttgtttcctgactttttaatgattgccattctaactggtgtgagatggtatctcattgtggttttatttccatttctctgatggccaatgatgatgagcattttttcatgtgttttttcactgcataaatgtcttgagaagtgtctgttcatatccttctcactttttgatggggttgtttattttttttcttgtaaattagtttgagttcattgtagattctggatattagccctttgtcagacaagtaggttgcaaaaatgttctcccattctataggttgcctgttcactctgatggtggtttcatttgctgagcagaagctctttagtttaatcagatcccatttgtctattttggcttttgttgccattgtttttggtgttttagacatgaagtccttgcccatgcctatgccctgaatggaaatgcctaggtattcttctagggttttttatggttttaggtctaacatgtaagtctttaatccatcttgaattaatttttgtataaggtgtaaggaagggatccagtttcagctttctacatatggctagccagttttcccagcaccatttcttaaataaggaatcctttccccattgcttgtttttctcaggtttgtcaaagatcagatggttgtagatacgtggcattatttctgaggactctgttctgttccattggtctatatctctgttttggtaccagtaccatgctgtttttgttactgtagacttgcagtatagtttgaagtcaggtagcgtggtgcctccagctttgttctcttttggcttaggattgacttggcaatgtgggctattttttggttccatatgaactttaaagtagatttttccaattctgtgaagaaagtcattggtagcttgatggggatggaattgaatctataaatttccttaggcagtgtggccattttcatgatattgattcttcctacccatgagcatggaatgttcttcaagttgtttatatcctcttttatttcattgagcagtggtttgttgttctccttgaagaggtccttcacatcccttgtaagttggattcctaggtattttattctctttgaagcaatcgtgtatgggagttcactcaggatttggctctctgtttccctgttattggtgtgtaagaatgcttgttagttttgcacattaattttgtatcctgagactttgctgaaattgcttatcagcttaaggagattttgggctgagacaatgggtttttctagaaatacaatcatgtcatctgcaaacagggacaatttgacttcctcctttcctaattgaatgccctttattttcttctcctgcctgattgcccttgccagaacttccaacattatgttgaataggagtggtgagagagggcatccctgtcttgtgccagttttcaaagggaatgcttccagttttgtgcattcggtatgatattggctgtgggtttgtcatagatagctcttattattttgagatatgtcccatcaatacctaatttattggtagtttttagcatgaaggttgttgaattttgtcagaggcattttctgcatctattgagataatcatgtggtttttgtcattggttctgtttatatggtggattaagtttattgatttgcatatgttgaactagtcttgcatcccagggatgaagccaacttgattatggtggaaaagctttttgatgtgtttctgcattcggtttgccagtattttattgaggatttttatattaatgttcatcaaggatattggtctgaaattctctttctttgtagtgtctctgccggctttggtatcaggatgatgctggcctcattaaatgagttagggaggattccctgtttttctattgattgcaatagtttcagaaggaatagtaccagctcctccttgtatctctggtagaatatggctgtgaatccatctggtcctggacttttttggttggtaagctattaatcattccctcaatttcagagcctattattgttctattcagagattcaacttcttcctggtttagtcttgggagagtgtatgtgtcgaggaatttatccatttcttctagattttctactttatttgcatagaggtgtttatatattctctgatggtagtttatatttctgtggaatcattggcgatatcccctttgtcattttttattgcgtctatttgattcttctctcttttcttctttattagtcttgctaatggtttatgaattttgttgatcttttcaaaaagccagctcctggattcaccgaattttgaagggtttttgtgtctctatttccttcagttctgctctgatcttagttatttcttgccttctgctagcttatgaatgtgtttgctcttgtttctctagttcttttaattgtgctgtttgggtgtcaattttagatctttcctgctttctcttgtggacatttagtgctataaatttcccagtagtcattcaggagcaggttgttcagtttccatgtagttgagcggtttggaatgagtttcttaatcctgagttctagtttgattgcactgtggtctgagagacagtttgttataatttctgttcttttgtatttcctgaggagtgctttacttacagatatgtggtcaattttggaataggtgtggtgctgaaaagaatgtacattctgttgatttggggtggagagttctatagatgtatattaggtcctcttggtgcagatctgagttcaattcctagatatctttcttaactttctgtctcgttgatctgtctaatgttgacagtggggtattaaagtctcctattattgtgtgggagtctaagtctcttcataggtcgctaaagacttgttttatgaatctgggtgctcctgtattgggtgcatatatatttaggatagttagctcttcttgttgaattgatccctttatcattatgtaaaggccttctttgtctcttttgatctttgttggtttaaagtctattttatcagagactagcattgcaagctatgcctttttttgttttccatttgcttggtagatcttcctccactgctttattttgagcctatgtgtgtctctgcatgtaagatgggtttcctgaatacagcacactgatgggtctttactctttattcaagttgccagtctgtgtctttcaattggagaatttagcccatttacatttaagattagtactgttatgtgtgaatttgatcatgtcattatgatgttagctggttattttgctcgatagttgaagcagtttcttcctagccttgaaggtctttacaatttggcatgtttttgcagtggcattaccgggtgttcatttccatgttcagtgcttccttcaggagctcttttagggcaggcctggttgcaacaaaatctctcagtatttgcttgtctgtaaaggattttatttctccttcacttatgaagcttagtttggctggatatgaaattctgggttgaaacttcttttctttaatgttgaatattggcccccactctcttcagtcttgtagagtttctgctgagatatccactgttagtctgatgggcatccctttgtgggtaacccgacattcctccctggctgcacttaatattttttccttcatttcaactttgttgaatctgacaattatgtgttttggagttgctcttctcagtgagtatctttgtggcattctctgtatttcctgaattttaatgttggccttccttgcttgattggggaagttctcctggatagtatcctgtagcatgttttccaacttggttccattctcccctcattttcaggtatgccatttagatgtagatttgctcttttcacatagtcccatatttcttggaggctttgttcttgtctttttattcatttttctctaaacttctcttcatgcttcatttcattcatttcatcttccatcactgatggaagttgattgcattggttactgaggcttgtgcattcatcacatagttcttgtgccgtggttttcagctccgtcaggccctttaaggacttctctgcattggttattctaattagccattcatgtaattttttttcaaagtttttaacttctttgccatgcgttcaaacttcctcctttagctgggagtagtttaatcttctgaagtcttcctctctcaacttgtcaaagtcattctccatcctgctttgttccattgctggtgaggagctgtgtcccttttgaggaggaaaggcactctgatttttagagtttccagtttttttgctctgttttttccccatctttgtggttttatctacctttggtctttgatgatggtgacgtacagatggggttctggtgtcaatgtcctttctttttgttagttttccttctaacagtaaggaccctcagctgcaggtctgttggagtttactggaggtccactccagaccttgtttgcctgggtatcagcaatggtggctgcagaacagtggatattgttgaaccacaaatgctgctgcctgatcgttcctctagaagttttgtcttggaggagtacccggccgtgtgaggtgtctgtccacctctgctgggggtgcgtcccagttaggctactcagaggtcagggacccacttgaggaggcagtctgcctgttctcagatctcaagctgcatgctgggagaaccactactctcttcaaagctgtcagacagggacaattaaatctgcagaggttattgctgtcctttgtttctctgtgccctgccctcagaggtggagtctacagaggcaggcaggcctccttgagctgcagtgggctccacccagttcgagcttccaggctgctttgtttacctactcaaacctgagcaatagcaggtgcccctcccccagcctcgctgccaccttgcagtttgatctcagactgctgtgctagcaatgagtgaggctccgtgggcataggaccctccaagccaggtgcgggatataatctcctgttgtgccatttgataagccctttggaaaagcacagtattagggtgggggtgacccaattttccaggtgccatctgtcacccctttctttgactaggaaagggaattccctgacctcttgcacttccccagtgggcgatgcctcaccctctttggctcacacatgttgtgctgcacccactgtcctgcacccactgtctggcactccctagtgagatgaacccagtacctcagttggaaatgcagaaatcagccatcttctgcatcgctcaccctgggagctgtagactggagctgttcctattcggccatcttggctccacccccatttctgttgtttttaagcccctattttgaggtgattggttacagaagccctgagaaataaatgcaaatatttaaaattttcttgtagggatggtcatgatgataggtacttaaaacctcatgacaggtaaaataaatgatttaaaccagtttgtccagaacacaaaggtgtgatttgagcagatcattaatcagaatcacatatgactattattatttgtaaataatatactaactacaagacagttgtttttttccccctaaatggctaagttctaacatctggtatatgttcttgtaaatctgtggacacaagcaaaatccctagctaaccatccattgtcaccatttaattactctcaggccctcacagaaaaacaaaacttcaatcaggctctagtccttgaagtctggtttgtaattgcaaaggctgttcttgtttaaatgaagctgggctgaatgtgggacaagatgaggaagaccccaatcctgctgctgaattcagtctccaagacactgaaccccacaagattgttttctgcacttttgtcatttaagacccaagtctcacctgtaatcccagaactttgggagaccaaggcctgcagattgcttgagcccaggagttcaagaccagcctgcgcaatatagcaggatcacatctctacagaaaatacaaaaattagctaggtgtggtggtgcatgactgtagtcccaactactctgtagactgaggtaggaggatcacttaagcccaagacaatgaggctacagtgagccgagatcacaccactgcaccccagcctgggtgatagagaaagattgtctccaaaaataaaaaatgacccaagtcttttggaggtggaagttcagtaacagattaatgatgaaactaagagggctagtgttagtgagatcctggatggccagcacaaactgactgctttgggaaaaaaaaaaaaaagttggtttatcttctcctgagaggttgttcatcttactttttagtagagtctttttaaaattaaccttgttagaacacaagaaacctgtgtttcttgttggctttatgttgtcatctcctggattgatttaaacatcctcaactccaagtgtcttcatttcctggggctgcccttgcaagtgaccacagaacctatggcttaaaacaaaaggaattgattctctcacagttctggagaccagcagtctgaggtgaaagagtggacagagctatgctacctctggaggttctaggaaaggattcttcctgcctctcccagctcctggaggctctaggcatctctgggcttgttgctgcatcacttcagtgtctgcctccatctccaggtggcttactcctctccatctgtgtctccttttgtgtctcttagaaacctgctgtttaatctagggccacactaatccaggatgatctcatcttgagatccttgacttaagtatacctgcaaagccctcatttccaaataaggttccattcacatattctggggataggatgtggacatatctttttgggacactatggttcaatccattacaattgtattccactccttctggaggctctagaggaggatccttcctgtctctctcagctcctgtggactctaagcataattgggcttgtatctgcctcactccagtttctacctccatctccacatggccttctcctctgtgtctgttctcttctgtctcttttctctctctttttttaattggagacagaggttcactcttgttgcctaggctggagtgcaatgtcacgattttggttcactgaaacctctgcctcctgggttcaggcaattctccttcctcagcctcttggttttctgtaaggacatttgtccatagatttagggcttatctaatccaggataatatcattttgagatacttaagccatttatatcttatctaaataagttcacataagttccagaggttaggacatagacacatctttgagggccaccattccacctgctacacaaggctctattaatatctctgacctacaattcagaatctctgagagagaagcctgggtgagtacgaagtgcagcaagaatatgatgaggaagtggcctctttagtgctggaattcatttgttcctgaagtagtttggcaaaactatactgtgatccatcacatatttcttatgatttaaccctcaatggggcaacctattttgctaatttttatcatattgtgtggtacctccccccaagaagacattagaaccttgtgtgttgttgaaattctgcatgcttctgttttcagatttgtgggaaagaggaaaattataggatatttatctcataaagccattgtgaaaatagaatatgagattcttagaacaaagcctgtcacatcacaagtactcagtatatgttggttgtttccatacttattgctgtcatttctccagtagtttgaagagtgatggtttccaaagtatgttcaagttaagcactacaaccactcttgggagagttgaattcggatgaagcgttcttagatatgaccactatactggtgtgggattagagcatcggtgtaggttcagtcctacaccatccaacttcagctgaagcttatgcatcctaagccatgtagcagaaccagaactagaaaccaaaactagaacaaacatgtgcgctgtgctgtgttgtgcctaaccatggagctttgggaaaacatggcctatcaaacaaggttttgagtggatgggacacttgggaaaacatgcacaattaaactaggctttgagtggatgaggagccttggaaaagcatggctgatcaacaaggctttgggtggatgaaaagacttgggaaaccatggctgatcgaacaaggctttgagtggattatgagccttggaaaaatatggtccatgaaacaaagctttgggtggatggggagctttgggaaaacatattccatcacacaaggctttgagtggatgaagagccttgggaaaacatagccgaccaaacaagacttcaagtggatgagacaaaggcttgaatttatttcctgttctttaatagctgtgtgaatgtagatgtcctctacttaaacttctgtttctttgtgtatatcaagtggggatgacaccactcattttaccaggccattgggaaaaccacagatatatcataattcataggacaaaacttgaaagttccattaaaaaaagaagaaaaacactgaagctgtgtccactctctggtaggacagcataaattatctgagagaaaaatgtaccctttttttgttttaggaaacattctatgatgcttcctaattatataaacagaaaaaacttcaaggactacatagttggagttttcagtcaaggggaattactatatggtgttgtctacagaaagaaaggaagggctgaggagcccaactagacaagtaggcacctcagagagtgagtcacagactgatgatgtatcaattgtggctgcaacactgtggcccaagactgacacaggaaatgcactcaccttccatttctcccacttcttctccaaagtccgatacctgccccattgctgacttcagcaacaagtcacctgataggagctctgcaggggacattctccttgccatgcagagctgaggatatacaggaagtagatcaggaaaacgggtgccaggaaatctagtataaaagccaacaattacttacaatgcttgattgaagacatttgtctagtttctttttttatcctttggggcattttttaaaatatatatatattttattatactttcagttctagggtacatgtgcacaatgtgcaggtttgttacataaatatacatgtgctatgttggtgtgctgcacccattaactcgtcatttacattgggtatatctcctaatgttatccctcccccctccccccaccccactacaggccccggtgtgtgatgttccccttcctgtgtcccagtgttctcattgttcaattcccacctataagtgagaacatgcagtgtttggtttttttgtccttgtgatagtttgctgagaatgatggtttccagcttcatccatgttcctacaaaggacatgaactcaacattttttatggctgcatactactccatggtggtgccacattttcttaatccagcctctcattgttggacatttgggttggttccaagtctttgttattgtgagcagtgccacaataaacatacatgtgcatgtgtctttatagcagcatgatttatattctttgggtatatacctagtaattggatggctgggtcaagtgctatttctagttctaaatccttgaggaatccccacactgtcttccacaatggttgaaccagtttacagtcccaccaatagggtaaaagtgttcctattcctccacatcctctccagcacctgttgtttcttgactttttaatgattgccatactaaatggtgtgagatgatatcttactgtggttttgatttgcatttctccgatggccagtgatgaccattttctgatgtgtcttttggctgcataaatgtcttcttttagaagtgtctgttcacattcttcgcccactttttgatggggttgtttctttttttcttctaaatttgttagagttctttgtagattctggatattagctctttgtcagatgagtagattgaaaaaattttctgccactgtgtaggttgcctggtcactctgatggtaatttcttctgctgtgcagaacctctttagtttagttagatcccatttgtcaattctggcttctgttgccattgcttttggtgtcttagacatgaagtccttgcccatgcctatgtcctgaatggtattgcctggcttttcttctagggtttttatggttttagatctaacatgtaagtctttaatccatcttgaattaatttttgtatgagatgtaaggaagggatccagtttcagctttctacatatggctagccaattttcccagcaccatttgttaaatagggaatcctttccccgtttcttgtttttgtcaggtttgtcaaagatcagatagtggtagatgtgtggtattatttctgagggctctgttctgttccataggtctatatctctgtcttggtaccagtaccatgctgtttcggttactgtagccttgtagtatagtttgaagtcaggtagtgtgatgcctccagctttgttcttttggcttaggattgacgtgccaatgcgggctcttttttagttccatatgaactttgaagtagtttttttccaattctgtgaagaaagtcattggtagcttgatggggatgacattgagtctataaattaccttgggcagtatggccattttcctgatattgattcttcctacccgtgagcatggaaagttcttccacttgtttgtgtcctctttcatttcattgagcagtggtttgtagttctccttgaagaagtccttcacatcccttgtaagttggattcctacatattttattctctttgaagcagttgtgaatgggagttcactcatgatttggctgtctctctgttattggtgtataagaatgcttgtgatttttgcacattaattttgtatcctgagactctgctgaaattgcttatcagcttaaggagattttgggctgagatgatggggttttccagaaatacaatcatgtaatctgcaaatagggacaatttgactaccttttttcctaagtgaataccctctatttctttctcctgcctgattgctctggccagaaattccaacactatgttgaacaaaagtggtgagagtgggcatccctgttttgtgccagttttccaaggcaatgcttccagtttttgcgcattcagtatgatattggctatgggtttgtcataaatagctctattattttgagatacgtcccatcaatacctaatttattgagagtttttgcatgaagggctgctgaattttgtcaaaggccttttctgcacctattgagataatcatgtggtttttgtctttggctgtgtttatatgctggattacatttattaagttgtgtatattgtaccagccttgcatcccagggatgaagcccacttgatcatggtggataagctttttgatgtactgctggattcggtttgccagtattttattgaggatttttgcatcaatgttcatcaaggatattggtctaaaattctcttttttagttgtgtctctgccaggctttggtatcaggatgatgctggcctcatcaaatgagttagggaggattccctctttttctattgattggaatagtttcagaaggaatggtagcagttcctccttgtacctctggtagaattcggccatggatccatctggtcgtgtacttttttttgttggtaagctattaattattgcctaaatttcagagccttttattggtctattcagagattcaacttcttcctggtttagactttggagggtgtatgtgtcgagtaatttatccatttcttctagattttctagtttattttcattgaggtgtttatattattctctgatggtagtttgtatttctgtgggatcggtggtgatatcccctttatcattttttattgggtctattagattcttttctcttttcttcctttttagtcttgctagtggtctatcaattttgttgatcttttcaaaaaactagcacctggattcattgattttttgaaggggttttgtgtctctatctccttcagttctgctctgatcttagttatttcttgccttctgctagcttttgaatgtgtttggtcttgcttttctagttcttttaattgtgatattagggtgtcaattttgggtctttcgtgctttctcttgtgggcatttagtgctagaaatttccctctacacactgctttgaatgagtcccagagattctggtatgttgtgtctttgttctagctggtttcaaagaacatctttatttctggttttatatccttatgtatccaatagtcattcaggagcaggttgttcagtttccacgtatttgagtgtttttcagtgggtttcctaatcctgaggtctaatttgattgcactgtggtctgagagaccacttgttataatttctgttcttttgtatttgctgaggagtgctgtacttccaactacgttgtcaattttggaataggtgcagcatggtgctgagaagaatgtatattctgttgatttggggtggagatttctgtagatgtctattaggtccactgggtgcagagctgaatttacttcctggatatccttgttacctttctctttcattgatctgtctattgttgacagtggagtgttaaagtctcccattattattgtgtgggagtctaagtctctttttcagttcactaaggacttgctttatgaatctgggtgctcctgtattgggtgcatatatatttaggatagttagctcttcttgttgaattgatccctttatcattatgtaatggcctgctttgtctcttttgatctttgttgatttaaagtccgttttatcagagactagcattgcaagctatgcctttttttgttttccattttcttggtagatcttcctccatccctttattttgagcctatgtgtgtctctgcacgtgagatgggtttcctgaatacaacacaatgattggtcttgactctttatccaatttgccagtctgtgtcttttaattggaacatttagcccattttcatttaacgttaatattgttatgtgtgaatttgatcctgtcattatgatgttagctggttattttgctcagtagttgatgcagtttcttcctagcatcaatggtgtttacaatcagccatttttctgccatggctggtactgatttttcctttccatgtttagtgcttcgttcagcagctcttttagggcaggcctggttgtgacagaatctctcagcatttgcttgcctgtacaggattttatttctccttcacttatgaagcttagtttggctggatatgaaattctagtttgaaaattcttttctttaagaatgttgtttttctcaggtttgtcaaagatcagatagttgtagatatgtggctttatttctgaggactctgtcctgttccattgatctatatctctgttttcgtaccagtaccatgctgttttggttactgtaaccttgtagtatagtttcaagtcaggtagtgtgatgcctccagctttgttttttggcttagggttggcttggcggtgtgggctcttttttggttctatatgaactttaaagtagttttctccaattctgtgaagaaagtcattggtagcttgatgggaatggcattgaatctgtaaattaccttgggcagtatggccattttcacgatattaattcttcctacccatgagcatggaatattcttccaattgtttgtatcctcttttatttccttgagcagtggtttgtagttctccttgaagaggacattcacatcccttgtaagttggattcctaggtattttattctctttgaagcaactgtgaatgggagttcactcatgattaggctctctgtttgtttgtctgtcattggtgtatgagaatgtttgtgatctttgtacattgattttgtatcctgagactttgctgaagtttcttatcagcttatctttgacaaaactgagaaaaacaagcaatggggaaaggattccctatttaatacatggtgctgggaaaactggctagccatatgtagaaagctgaaactggatcccttccttacaccttatacaaaaatcaattcaagatggattaaggacttaaacgttagacctaaagccatcaaaaccctagaaggaaacctaggcaataccattcaggacataggcatgggcaaggacttcatgtctaaaacaccaaaagcaatggcaacaaaagacaaaattgacaaatgggatctaattaaactaaatagcttctgtgcagcaaaagaaactaccatcagagtgaacaggcaacctacaaaatgggagaaaattttcgcaacctactcatctgacaaagggctaatatccagaatatacaatgaactcaaaccaatttacaagaaaaaaaacaacaacgctatcaaaaagtgggcaaaggacatgaacagacacctctcaaaagaagacatttatgcagccaaaaaacacatgaaaaaatgctcaccatcactagccatcagagaaatgcaaatcaaaaccacaatgagataccctctcacaccagttagaatggctatcattcaaaagtcaggaaacaacaagtgctggagaggatgtggagaaatgggaacacttttacactgttggtgggactgtaaagtagttcaaccattgtggaagtcagtgtggcgattcctcagggatctagaactagtaataccatttgacccagtcatcccattactgggtatatacccaaaggactgtaaatcatgctgctttaaagtcacatgcacacatatgtttattgcggcattattcacaatagcaaagacttggaaccaacccaaatgtccaacaatgatagactggattaagaaaatgtggcacatatacaccatggaatactatgcagccataaaaaatgatgagttcatgtcctttgtagggacatggatgaaattggaaatcatcattctcagtaaactatggcaagaacagacaaccaaacaccacatattctcactcataggtgggaattgaacaatgagaacacatggatacaggaaggggaacatcacactctggtgactgttgtggggtggggggagggggaggatagcatttggagatatgcctaatgctagatgacgagttagtgtgtccagcacaccagcatggcacatgtatacatatgtaactaacctgcacattgtgcacatgtaccctaaaactttaagtataataataaataaataaaaagattaaaaaaaagagaatgttgaatattagcccccactctcttctgtcttgcagagattctgctgacagatcagcttttagtctgatgggcttccctttgtgggcaacccgacctttctctctggctgcccttaacattttttctttcatttcagctttggtgaatctgacaattatgtgtcttggagttgctcttctcgaggagtatctttgtggcactctctgtatttcccaaatgtgaatgttggcctgccttgctagattggggaagttctcctgggtgatatcctgcagagtgttttccaacttggttccattctccctgtcactttcagttacaccaattagacatagatttgttctttcacgtagccccatatttcttgg

SEQ ID NO: 262 - DNA, 6998 bp, Homo sapiens
gaggtttagtcccgcccccctctcctcgctgcttaggctccgcggcctccaagctgtagctatgacggcgcgcgggactccgagccgcttcttggccagcgttctccacaacggactgggtcgctatgtgcagcagctgcagcgtctgagcttcagcgtcagccgcgacggcgcctcgtctcgcggcgccaggtgagccaagggaagtgcgcaggcgcgggtcggggtgggtgtggaggtggcaacgactccccgggtaggtcgcccccagtcaggggtcatactgctcactgtcccgggtcgcttagggagttcgtggagcgggaggtgatcgacttcgcccgacggaatccaggggtcgtaatatatgtaaactcgcgtccgtgctgcgtgcccagagtagtggccgaataccgtgagtggggccgggctcgggctggagggcgggatcaggggctcgacccgctatcctccttctcgcttggtcgcaccggccagcttccacccactctcacccctcttctgccagttaacggggctgtgcgcgaggagagcatccactgcaagtcggtcgaggagatctcgacgctggtgcagaagctggccgaccagtcgggcttggacgtgatccgcatccgcaagcccttccacaccgacaaccctagcatccagggccagtggcaccccttcaccaacaagccgaccacgttccgcgggctacgcccccgagaggttcaggatcctgccccagcccaggtgcaagcacagtgaagagttgccccaccaactgcagccccaggctttggactgttactccggtaaaggtggttcttcccctttgggattccaagcccaggcaaatggaacccatcaatgggcaagttgacagaggttctgcttgggataatgaagagctgcctgtttctttccagtgcctgcttctgggggcagtgaccttgtgaaccactcatttttatgcaagtggcatccctaaaacctgagatgaggaagacttcaagggttttacagggcccttgttttttaaatccaaattgataataatgatctcaaaacacagtgagaggtctgaaggctggcttctgaagaatccctgatgtcttattggaacaaccactgagctacggagagctctgctgtgatgggctaggcactttatatctgtgtgaatacagatttataaaacaggttaataaacttatccaaggtcacatttcaggtctgtcttcaaaatgtgtgcatatgttaagcacaagcctcagttttcattattttaaaactagacgcagaacatataacaactgtcaggtggttagtatcaaaggccaagtgattaatctaggcctgacccctgaaagggagaggggagtgattctcagaccaagtcctggctgacaagctttctctggtcttagctatacatctccttccccccacgtccctctttgtgcagaaataaaatccatgtcccttgagccagctggtggggggtgctgagaaccttggggaagggcaggaaggctgatattaatgagtattttctaatcttagtttaaaaaggggggatggtggggaaatgagaggcaggaaatgaaaatctagaaacccctgtaagaattcttgaactgttgtcattttcttgtcatgccctaacaccatgatcaatgaatagtgtgaaccttactaaagaggcctgtgtgcctgccaaggagtcaggatggaagcggaggatcccaatttcctctgcaaatagttgtattggggagcagagccaatcctggaggcagatatcaccttctgtataggctcaggagcctgtcccctggtgatcaggggtgggcgcatctagatgaagcagactagtcatagctgtggggaaaaagggtgtttattaaccaacggcagggggaggagctgagcccaggctccccactctgtcacatgcctgttccacccacctggttgtaagtgggggcattcctaaagaagtgtagccattctcacaataaatacattcattgtggggtggaggtgggagaggttgggtgaagggcagtaaaaacccgtgggattccacgttctcagctacaaaaataacagtcatcctcacccgaggggaatgggggagctcagtcagaattgattgtcccatataggcctagagacttcagaggcccctggcccctgaaagtgccccggtgaggtaggacaggggtaggagctaagcgtccaaactcccagcctctgccctttgcatagttccaagaatgggcttcatgtgccagttgagacatcagatttctcctccctttccctgctgtagtctagaggaagcaaatgcttgattcccccaaaagagaggctggctcattgagtgcagtgttggtcatccatcctaggcaagggcctgtgaggacagttaaatgggagggggatctccctctgaaatgtccacggactaaacccaacagacaggtccaagacagcaagggaggctcagaggtgcatgtgagtggaaatgtaagcacatgtgtgatacaggtgtgtgttaccacatgtgcatggggatgggacatgcctggagctctgtctctcatactcttgagaatgaccaaggagagtggggaggctgattcacaagggccacacaggaagggagaggaggggagtgatgcagtcttacctccccaggctggcccgttcccaagctcttgacaaagaggtcaccacatggggctggggaagaggaccagataggatgtggcaattgggagggtaccccaagtccagaagcagggatgaaacaagaatgcaccaggagaaggtgagggtgggggcactgcagcccagccgataaacattcttccatgtgtgcatgtgaatgtacgcagggcttaggtggctggcagaggtcttgtctggtttcaggaccatccagcacacagggccatgcagagggtggtgacattgagcccatatggacctgcagagccctgcctgggagaaagagaaagggtttgggcagatgaatggaacaggaggatggagtcctcacctataagtgtttaggttaggggataggaactggctctgggtctgcagggcacctgatcctgagggagcacctacctctgaggagcaccgatgggcctgggctgctcacatgtgggtctgtggagactgaggagggggctttggctgggcctgactggccagccctacagggacatcaaaaagttgggagaagggtatggagtgggggtaatgaagggagggtggctgtgttagggaggcagtggcccagcctgggacagataggctggcttggaagagcatttgttctgggaggctgggctcagacagagctctcatctagctgctccacgagctgcgtgtgcttccttttttccaggatgcggctgagttcctcggcgaaggagcagggccctgctggtactccattgttgctctgcctcagaagcacatagctattgccattcatcctccgcagccggctgggcagtgccaccaagccattggtcagctcagccggtggcggtgggggcggtgggggtggtggggctggggctccctccccagggatgatctggagacagctgccctccaggcccccagccccctcatcatcaccctcatcttcctctccaggacactggcctgagactgtctgcagttgcaccgcagatcctcctgcccggctggcccgacccagtgagtatttccgtcggcgccctcgtctgccttcccgcagacaggccacatagaggagggaggaggccaggatgaggcagaggccaccaagcgcggcaatggctagcacatagagcagtctcacatcaggtgccagctgtgccccaggtgtggcaggggcttttggagctggggcaggagtggctggccggactgtgagactataggaggccagcagggtgcggaggccattttcctcggcatagcagccatagttgccactgtgctcaggctgtgcatctgtaaccagcagcccgtccacgcccacacggtagccaccctgcccatcgctcaggcccatgctcccattgagtagccacaaggcccgggccaggttggatggctggtcacagggcaggaggacatcatcaccccggagcacagagcgggtcttcagtggtggtggtggccctgtggggtttgggggagaggtcagtaccagcccgtcccaggaagggattagagatggcaagccagactgttcactgccaagtccctggcaccaagcacagaacccagaatcacagtgacagctgacccaggctctgtgctcatgcttccacagaaggttcacgttggcccttcccaggaagcaggcagtgccttgggcccttttccattctctctccatgctctcatcctctcctgtggtttcaatttctgccatctgccagtaactcctaatctctacctcagacttctctcctgagtgccagactcggatatctaccatgtgctgggcatctccacatgaggtctcttggacacctcaaaaccaaagcttttctccccaacgacaccaagtcctttccttgaatcgccaccactgtgaatggcaccaccagccacacagttgcttaagtcagaaacctgggagtctcccttctctttcttgctcgcctttttgttttgttttgtttttttgagacggagtctcattctgtcgcctaggctggagtgcagtgacgtgatctcagctcactgcaacctccacctccctggttcacgcgattatcttgcctctggctcctgagtagctgggattacaggcatatgccaccatgcccagctagtttttgtatttttagtagagacagggtttcaccatgttggccaggcttgtctcgaactcctgacctcaagtgatccactcgccttggcctcccaaagtgctggattataggcatgagccaccgtgcccggcccttcttcacgtttgtatctaactgtcactaagattctgtttctggcatctatcttagacctgttgatttctctccttccatgactcctggcccactctggccccatgtaatccattcttcatgagaggtattttaaaaacacaaatctgatcatgccactctccagcctaaaactcttcagaggtttcctattgcttttcggataaagaccaaaatcttcaacatggcctttgcccacttgtccagcctattctcctgtcactcaaatgtgccagcctccctctgcctgctgctccctctgcttgcatgtcaccccattaccccatgtcctctgcttgcctggctaacttgtgggagatagcatagtatagtgaccagaagcacaaagtcaaatcagactgcttggggtcaggtttgaattcttttttctttctttttttttttttttgagatgagatgaggtctcactctgttatccaggctggagtgcaatggtgtgatcttggctcactgcaacctctgcctcccaggctcaagtgatcctcccacctcagctttccaagtagctgggattacagacatgtgccaccacacccggctaatttttgtattttttgtagagatggggttttgccatgttgcccaggctggtctccaattcctgagctcaagcaatccacctacctcagcctcccgaagtgctgggattacaggcgtgagccactgtactcagccaggtttgaattctggtccagtttcttaatagctgaataagtttgagcaatttacttacactccctgggcttcagagaggtccctcatggggataataataatggcacctttctcataagaatgctgtgacagtagatgacatcatgcatagaagtatttagatcagtgtctggcacacagtaaatacttaatacatcttagctgtgatgattaacttttgttctttcttcagatatcagttcagtcatccgatcttccttggggaaatacccattaccgtcctgaacccttgtcatccactacttggctataagctccagaagtgacaagacacttcacatcttaaatatgtttcctagtttataattcatttgggcagtaaatgtttgttgagcacttactctgtgccaggctctgtgtttgagtcatccttaccaaatgtacatagccacagccactcagatacaaacatatacgtacacatggcagtaaatggcaaagaggacagtctgcgtagctagacccacactcatatgagtcacttacctgtatccctgctgctctcacagcctcgatttcctctctctatgtcctgtatcagtgctgtcctgggacagaagatcaggttttatgaacaaggggaactgggtttcagtttcccagtgaaagggtagataggtctgttactaataactagcccctgcactcccccagtagctatcaggccttcctcctccactcagaccacatgtgactgtcaccccccaccacttcccacctgcttccctgggacctgttggctatggtggtggctgctgcgcaggcatgggtgccagggtcccagccacagtaggggtctcgggccaagatgcagtcatagcaggatcggtagcgggagcagctggagagtggtagctggatgactccgctaggagcccccacatagaggctgtgctgggagccagataggacagttggtcggcagcgtccccactcatacagatacacagcctctgcccaacctccccactccctcttcctatttcagcaaggctatattaagggtcacagagaagggctacctgcaatagagagatgactagattttccacagactgggactccctgaacacttgtgtctcttcaataatgtgcatcccagagcccaggactacggccttgtggatccagccatcagctggtatggaaagagcagagagttagaccccaactatgggatctgctctcagcaccctgcaagaggcctaa

SEQ ID NO: 263 - DNA, 6834 bp, Homo sapiens
ggcaatggaaaaattttttagtaaaactggaaaaggctctataaaatgtcctgactccagcagtcttgaggcagcacacaatggcatcagtgtctaggtggcaggcactccgggctgacagcttccttctatggctctatgaccaagcaacccagcccgaggcagctcccaccagtgaggccctgatattgcagggctaagcacctaggatccaattctagtacatgccacctcatgctaggctctacaaagtggggagcagaggagcttggtacccactgtatcaccctttgactttgaaagcctaggctggagtttcgcatgaagtccccgattcccctccaggttcatgcggcctgacctcactgccttgaatctgacctgctcattcctacctcagggcttggatttccttttctctctgcctgggtccccttcgccggatgttcacgtggctctctccttctagttgtttaggccccagctcacatgccctcggctcagagacaccttttcagaccacttatctacactagcctgccagcactctatcgcatttctattttctttacagcatttttcactaaaactaggttttctgctaatttgttcattgcttgcttgtctcttccgccagaatgcatgcaggcagggactttatctctcttttcagtgctgtatatacaggacctcaaacaaagcctgagcaacacagtagtttctcagtagtctgctacattgaattttctcactatggaaacctgctctaggttaggcccctcagactgagaagggcacacagctcaggaccacaggatagaggagcccttgcagagttttatgctccagcctatcctatcaggctcatttcagtgaccagctctgcacggccttcactttgaacgcttggaggtgtctggctggtcgggagtgggggcctggcctgagcaaatctcagagttctgtgtcgtagccccctttttgccagaagagggctttttggccactggtccagtgtcatccttgatcttcttgagccgggccttgttctttggtggaatggagaaggtgagggagttcttgttgaactcaagcgggaagacacctacatctccatcaaagcggttcttggacacctgcagataccgtttccctggcccggttaccagcttcctgtcctgcaggatcagaacattgtctgcttcctggcttgcctggggaacagggggcagaaggaggaaagcaggagtaagaggacatgagcaaagcagaaaggggggctgacagggcagggaggagtgataagaatggggagaggggctgggtacaatggctcacgcctgtaatcccagaactttgggaggccgagtcgagtggatcacgatgtcaggaaatcaagaccatcctggctaacacggtgaaaccccatctctactaaaaatacaaaaaattagctgggcatggtggcatgcacctatagtcccagcttcttgggaggctgaggcaggagaatcgcttgaatccgggaggcggaggttgcagtgagccaagattgtgccactgcactccagcctgggcaacagagcgagactccgtctcaaaaaagaaaaaaaaaaagagaaagaatgggagagggaaaagtacttccccccatgaccaaagctctttgaactactgaccacgatgctggggccactcaaatctttcagttccctgacaagcttgctactgtttcagacgctgcctgtgctgttccctctccttctccacagcgggccaccccactcaacctcagcttcttctcttttaggtctcagtctaaatgtcacatctcatgaaggagaccattctttttttttttttttttttttttttaaagacagggtctcagctgggcacggtggctcacgcctgtaatcccagcactttgggaggccgaggcggacggatcatgaggtcaggagattgagaccatcctggctaacacggtgaaactccgtatctactaaaaaaatacaaaaaattaggcgggtgtggtggcacatgcctgtagtcccagctacttgggaggctgaggcaggagaatcacttgaacctgggaggtggagcttgcagtgagccgagatcgcgccactgcactccagcctgggtgacaaagcgagactccgtctcaaaaaaaaaaaaaaaaaaaaaaaaaagatagggtctcactctgctgcccaggttggagtggagtgcagtggtgtgagcacggctcactgcagtctcaacctcccaggctcaagcaatcctcccacctcagcctcctgagtagctgggaccaaaggtgcatgctaccatgcccagctaatttttaaatatatatatattatatatatatattttttgagacggagtctcactctgtcacccaggatggagtgcagtggcgcgatctccgctcactgcaagctccgcctcccgggttcacgccattctgcctcagcctcccaagtagctgggactacaggtgcctgccaccacgcccggctaatttttttttttttttgtatttttagtagagacagggtttcaccatgttagcaagatagtctcgatctcctgacctcgtgatccacccgccttggcctcccaaagtgctgggattataagcgtgagccaccacgcctggccaattttcaaatatttttgtagagacagggtctcactacattgctcagattgccaaactcctgggccccagcaatcctcctgcctcagcctcccaaagtgttgagattacaggtgtgatccactgtaccctgccatttttccacttctgcattactctctttcccagctccatgtttgttccatcatggcacatgatttgtgctccttgctctgaattccctaggcccagcccaggcctcgtatgtaataggcattcagtgtaacactagaagctccaggattgggctggtcctgatgcccagaaggccctcacatttatctgattgtctaatacccattgtctaccaaacctcaacccaacctttgttgtcacctcctctggaagtctcccagatgtcccgggctgactcagacatcttttctctttgctctccaaatacttgtgctgcctatcatactcttatcatactgaattgcaatcactgtcttactgtttccccaggagaggatgtgagctcctgggggacaagaagagcataagaaccaactatcagcctttgtatttccagcacatatattcctcatgtcatggccccagaggcattgcctcctgcctgttcggatggacagtcaagacgattaaggctgaatgagggctgtccctggtcacacctacccactctattttccaaagcttgagctccgctaaaggccactcactttggctgagccaaaaatggacgctgtctgcagttccttgtcatcatcctctttccgggggtgaatgaccagtgtcacatggcagttattgtctgttgcaaacttccgaaagaccccgatgatgtagtcttgagctgcgatcctacgccatcccaacaacacaaagagcttatcagacacagaaggacaagaacatacacatactcttgatccattcacatctccccacaaactaccacaacccactctacctccctctacccaaggactcacactcagatccctgtccatacatcctgctgccataccccacacctccatatgatacacatgggggtggtacgtgcctgcacacatctcagaaaataggagagcacagcatgtgtgcctagaggccagctgcctgagaagtgtgtgttgtatgtccaagcgggctcaagctagacaagagaggatgtcaccgtcacctgtctgtggacagctgctcgtgacccatcatgaactgcaggttgtcgatgatcacatgacaaatgtcatagacgtagactgcatgttgcattgtatctattacagtcctgggaagaggaaaggcaaggaatttgacaagttgtctctagaccaccccaggcagaagaactagcatcctgaaaactctcttggctgcctcctctgcccttctattattattactattatttgagacaaggtcttgctctgtagcccaggctggagtgcagtggtgtgatcacagctcactgcagccccaacctactaggctcaagcgatcctcttactttagcttcttgagtagctgggaccacaggcatatgccatcaccatgcccagcctaatttttaaaaatttttttatagagaggggtggtctccctatattgcccaggttggtctcaaatccctgggctcaagtgatcctcccacctcagcctcccaaagtgctgggattacaggcgtgagccagtgtgtccagccctgccctctcattctttgaaaaactccaaacctaaggagatgggggagttcctactggagctggaaaaggaaccaaaggttcctgagtgctgggatatgtctgggaaagcaaggtggctggaatctgggagtctcacctgatgctttgctgtccatggaaagtcatgaaatagaggggcaggtcctcaaagcggtcagcccagtgatcatatttgtccagttgatcttccagccgcccctcggcaaactgtgtcagcatgacccgggctagtctcacattgctgatctcgaagctaccccacagtgtgttcaccccctgggaacacaaatccagggcatactcactgatgaatgtcgtctttccactgcctgttggccctgcagtggggtggaacagacctgggtgaggaggaagtcctacccttgaaaccaagacataggtcagggctttaaaactggggggaaagggccaaccttcttttcaacattgtcatggcccaaacccacttgcttttgtcacctgatcttctgcccctttactctaagtagtgatttctcaaagggttacctgtgaagaccgtcagctcgccctttcgatgtcccttcaagatacgattgaggtctggaaagcggctccagcggaggccagctgcttgctccacatttgacagttctcctagcacctcctcccgaagctgccggaaagatacgatggacttgtgccaggcaggcagggcggtacgaagaatacgagaaagattgaagcctccgttcagggcctccaggggacggggttgctggtctcctggtcgcaccaagaagcatcgtttggggttcagttttcgtgcaaacaacttggcggcttcccaggaccgaaggtcatcccccaaccagaatacaatccgccggaactgttccaggtaagggagtaaggcagggggtaagcaggtcgttcctcggggtagagtaagggtaggcagccccgtggactggttcaaggccaggctgtcaagctcacgactcgtcagtaccacctcagcatctcgacgactaatcagtggtaatccaaacagattgtggtaggcgctgggtcggggaatagtggtttcctcgtagctcactccatccccctggcatttagcctctaggagcttcaggcctcgtaatcctgagcccccaggggagaaccaagggaagacaagactgcgagcaggtcgcagatatcgcacactgaaacgcttgagtgtgtcatctgtaaccttggtaaggccaaacattgtatcagccagctgaacctcctcctgatcaggcagctcccagagaggtattgctcggttccagatcctccggacctcctcgctgtcctcaaattctggtgccttgctaagcagaaacccctccctggccccatcccctcgcccctccacgctggcctggaagtcttcccagctcccttctgctaggctggtcatgcagagaaagtggcctgtggtcttgtcaatgaagaggctgaaggaagtggtaacaccagtctggcctttgagctgtgaagactctgcaaaggggctcagtgcccgcaggcaactgtgaccatcctggaaggggatcccatgcccccgcaaatactggcggatttcagttgcagttacaggcaacactggcatatccaaggcttggagagtctccttcctgtaacgtctgcgaggagggcctggggccaagtttcggggcaggcccctccgacccatccactccccacgcaggggtaacaagatacggagggggtacccacttcggaggaggacccacattcctagccaaatgtgggaagtcactacttgaaatgccttaggtgcctggttagcgtgccttcactagaccaaactctagggatatcccacgcagcactctgcagagctcactctaggtgcattctttctctccatgaatttctcctcttcagcccctctacgttgctgcttcacacatatgcccatctacacgaccctttcgcgtccacgtccttctacaatggctcccccacctctatggtccgttagttagtttctctccgccacctcacctctatgaccctctatacagttcctcactgacacagtttctttgcatcatcttctcacctctactgctcctccacagcatctcctcgtcgtcctcatttctatagtcatctgcatcctttttgtagtccctttgccctaggccccgactagagaccctcttccgcttctccttcccctcactgggacctcaacacggcgagagcacccagcacgactcccgccaatcccccggcccaaaggaatgccagtctctatcctcccccgtgtcttcactccgctctactactccgagctccgccgcgccggcccccagccccaggttaccacttttctctctcccacttcgccggcaacgtgagtctcccgca

SEQ ID NO: 264 - DNA, 336 bp, Homo sapiens
gcaactttacaaagtccaggaccagggatggcaagtcttgggatgaattgtagccttggctgcgcaatgaatctgtgatacactggcgtgggggacgaaggtggtgaacctcgggactccaccacctgcctgccctctccacaaggccagaccctttgacccttccctgggctctgtctactcagcactggccccaggcctgggcactcaccgagccaggccggggctcaggcaccccaccctcatagcgaccccagcgccgggaaccatcctggtattccatatagggtcctgcaaagacagcctggatctctgccaggtcatagcggcagatgg

SEQ ID NO: 265 - DNA, 504 bp, Homo sapiens
aaaggttttggtctttgttctaaatagttatgatttgtttttcttttctgttttgtctccagtaaaaaaaagcttatctttttattttctccctagcttcaaaatagatttttgtctggacataaaatctgttctttaatcttatatctctaaacaaaaccatatggcttactgtcacttctttggcaaggcttgagtttctttcaggatatgttgtaaagttcccataggctgtaagttgacctcacctatagagttagaattgtaaaagagctacattcctattccaaaatttctgcaaagtgccagattgcagctatactcttctagagccccccataattacgttctttttcttcccagaatcctcctcactcactctctattgcagccaagacatgtttggcatagaaccagggaaagccaatagaaaataatgtaacacattattcagtgtcttgtatatttcaaatctaattgttatggaggggacctatactatat

SEQ ID NO: 266 - DNA, 528 bp, Homo sapiens
ctcccaaagtgctgaaattacaggtgtgagccaccacgcccggcagaatttcattcttttagtttagtggcccttagctgtttttgaacgctgacccctttgagacttgataagagcaacttcctaataaatgtacatacatccatatatcaaaatttgaaatataatatctgggagatcaaggatcccatgaaaacatccacggattccctggaccccagattaagaattcttttggtagttttagcccatttctaattgtcactgctaattgcctattgttagtctcacttctttgccccatttatcatctgtctcaatcccttcataattaggataggagtggaggtaacagctgcctctaatggaaaaatcagaggatgacctcgttttctcttttatagttttaccgagataacctgtctgcttttcagccttagaaactgtacaaacctgtagtgctttatgtgtctatttactaatcactgtatcctcagcacccagcatagtgccaggcatgtagatgct

SEQ ID NO: 267 - DNA, 1210 bp, Homo sapiens
ggggaagcagagagtggaaccacatagttcagcaggaaagcctcagttcattaattccaagcaaatctagtaaatggcttcctaccataggctgtgattgcttcagaggagaataaaggaaggttaatcaatggccattttaaaaaatctgaaaaatagatttgactgctaataaaatttagattaaatagtttatttctgaatattccacatcgggtatattacatctgcacatcttagatctgatgcaaagccacactaaatggcttctgtgactaaatagaatccaccttgcatttattggtattgctttattttaaagcattctttaaatcatctatacaatgataaatggtgaaatattacagctttcatgtgcgattaacttaaggagtcttgaattcgtttccattgatgcctcaatcataaaatagggatatcctcttttaaaaccgaggatagaactttgttgtgtttggccaaatgctgttgcaaaatcccccaagcaagaagatttacaggcaaaaatgttgtagacatgacaaagttagaagcatatttagagtatgagattatgtaatacatcattctataggtttaactgttgtgagttttttcagccacaaagggttaaaatgaaaaaatcgaaatgttatgtctttgtgaaacaaataatttactttcactgaaaatattattgaaaaaataatcataagatctaatgacagtgccaaaatatagaaaacaaaagttaccatggaaggtgctgtggcttaagaacatcacagctatgatcatatagtggttagtactctgtgttgtgcctgcagcaacctcagttgtatccaagttgtggcaccaaaaattaaaaaaaaaataacaatgcaagttcactataagtccatagcctaacatctgcctttggtcacggccttgtacttattatggaagcagattattataaagactggtctgaaatgaaaaacgtaaaattgaacttagcaatcaccatacatactaataagcctgtgaagagagtttgcattttttaaaaaaatcagatattagcttgcttgataacagatctttgaaagtcttaaacggactcaagttgaaacattctctggcacccataagcctggacctaacagttctttggccaaaaatgatcccattttaatagatggtttttaggaagagcttttaagat

SEQ ID NO: 268 - DNA, 9591 bp, Homo sapiens
gccctccgcacccccccctgcccccccaccgttcgccgctgcaggcggtcggccgccgcgatgaaggcgagctcgggggatcaggggagccccccgtgcttcctgcgcttcccgcggcctgtgcgggtggtaagtggcgccgaggccgagctcaagtgcgtggtcctgggggagccgccgcctgtagtggtgtgggagaagggcgggcagcagctggcggcctcggaacgcctgagcttcccggcggacggcgcggagcacggcctgctgctgaccgccgcactgcccaccgacgcgggggtctacgtgtgccgcgcccgcaacgcggccggcgaggcctacgcggcggccgccgtcaccgtgctggagccgccggcctccgaccccgagctgcagcccgccgagcgcccgctgccatcgccggggtccggggagggcgccccggtcttcctcacggggcctcgatcccagtgggtgctgcggggggcggaggtggtgctgacgtgccgggcggggggcctccccgagcccacactgtactgggagaaggacgggatggccctggacgaagtgtgggacagcagccacttcgcgctccagccgggccgcgccgaggacggccccggcgcgagcctggcactgcgcatcctggcggctcggctgccggattccggcgtctacgtgtgccacgcccgcaacgcgcacggccacgcgcaggcgggggcgctgctccaggtgcaccagccccccgagagcccgcccgcggaccccgacgaggcccccgcgccggtggtggagccgctcaagtgcgcgcctaagaccttctgggtgaacgagggcaagcacgccaagttccgctgctacgtgatgggcaagcccgagcccgagatcgaatggcactgggagggccgcccgctgctcccggaccgccgccgcctcatgtaccgcgaccgcgacggcggcttcgtgctcaaggtgctttactgccaggccaaggatcgtgggctctacgtctgcgccgcgcgcaactcggcgggccagacgctcagtgccgtgcagctgcacgtgaaaggtacggcggagcccgggacctagggaggggcctcgagtgtcctccgaggccctccgaactccagccctcctcggtgcccagcgctgcccccaagactggaggagaggtggtccgcgggaatattaaaataccaaacccgcccgcctctcactccccagggattcggatttagtaggtctccagggtactcaggaacttcttagcaaactccttaaatgattccgaggcagatggtggaacaccactaaggagtgattgatgtacaaatccggagggccctagaactcttcttccctagtggttttcaacgtctttgttattttactcctccttcccccactgaattcacaaccagagccccaatatatgagacagataaaggagtagtttatgggcgtaaattgctgagtctacgtatataacaggtacttctaaaccatcagtgagaataaggaggctattttattgaatacaggaatttgaattaaaggctgcattcatgagaccaggctctgaaccctgtggggacggcctggctgcatctgtcaccttgagaaacaagtgattcagtggaaagctagacttgagggaggacaaatgtcctgcgtgtttttactattctttgattaaactgctccccacgtttgcaagaagaggaaggtgaaggagagaaggtttatatttcaaagttgaatcaccaacaatatccaataaatggttacattctcataaacagaaaattccaaaggaaaaaaaagcacaccccaaactcaccagaaggtaacgctccccataataggatttcatcacaacgcaaaagagtacaccttcactagttattgtccagttttttctcttagaggaaaaaaagttggtaaattctcctgagtccttcctagcatgcagtcaaggcatgttgcccccaggctgcggtggtggcctcactgttacagttcaatgctcacagattcatcaggttggtgctgatctggacctccatcaggaaagaaaagcccggagggaaggctagaggagcttccccgagttgcatacacacacgcacacaaaaacttgcttctccagcagccctagttaatcctctgatttccaacatcctgttttcttttcttttctttttttttttttgaaatacacttttgaaaaggttaaaatagctaggcacagtggctcaccctgtaatcccagcactttgggagactaatgtgggcggatcatttgaggtcatgagttcgagaacatcctggccaacatggtcaaaaccccatctctactaaaaatacaaaatcattatccacgcgtggtggcgcctgcctgtaatcccagctctacttgagaggctgaggcaccacaattgcttgaacccacgaggtggaggttgcactgagccgagattgcgcgactgcactccatcctgggcaacagagcgagactccatctcaaaaaaaaaaagagttaaaatattttaaattctactcatacccttgcagaatatgtgaaatgactggggcggggggagccagggaacagtttggaaatcaccaatctagggcctggaggaccccagggaacagtttggaaatcatcaatctggtccaaccccttctctccctttccccattttacaagtaaggagactgaggcccagaagcattgaaatggacttgcttaaggtgatgtggctagtgtcagggctggatgagaactcaggtcatcttaggaaccaccactttccttctggtagttttctgtgattccacagtgcccgctggctctgcatgaagagcacacagcatgagctaatgcgcttctaggtatcctactcctagtctgggccttctccagagccctctcttgtctctctctcccctctccacagagccccgcctccggttcacacggcccctgcaggacgtggagggccgtgagcacgggattgccgtgctggaatgtaaagtacccaactcccgcatccccacggcctggttccgtgaggaccagcggctgctgccctgccgcaagtacgagcagatcgaagagggcactgtccggcgcctcatcatccacaagctgaaggcagacgatgatggtatctacctgtgcgagatgcggggccgggtgcgcaccgtggccaacgtcacagtcaaaggtcagctggcccgtggggaagaggctgaggcggaggcaggcaggtgctcagattccaggttgatggattcctgtccgcatctcagggcccatcctgaagcgcctgccccggaagctcgacgtctggaaggagagaatgctgtgctgctagtggaaactatagaggccggggtcgagggacgctggagccgtgatggggaggagctgccggtcatctgccagagcagctcaggccacatgcatgccctggtccttccaggggtcacccgagaggatgctggcgaggtcacctttagcctgggcaactcccgtaccactacgcttctcagagtaaaatgtgagggcaggaaggcctctggacaggcgaggcagggcaggaggttggccagatgccggagctgggttggtgaagtagatttaaggtggaagggctgtggaggcccaagcaaggccggaacacatccctgccttggtctcaggtgtcaagcacagtcccccaggaccccccatattggcagagatgttcaagggccacaagaacacggtcctgttgacctggaagcctcccgagccagctcccgagaccccattcatctaccggctggagcggcaggaagtgggctctgaagactggattcagtgcttcagcatcgagaaagccggagccgtggaggtgccgggcgactgtgtgccctccgagggtgactaccgcttccgcatctgcacagtcagcggacatggccgtagtccccacgtggtgttccacggttctgctcaccttggtgagttggtcctgccagacccacccatcacttctcctcccttccccagccctcagtgctggtcctctcacaggcttgccatccgcccagcctctgccctctgccacaccttctagttctgacagctgcactctgtccctgcctcagtgcccacagctcgcctggtggcaggtctggaggatgtgcaggtatacgacggggaagatgccgtcttctccctcgatctctccaccatcatccagggtacctggttccttaatggggaagagctcaagagtaacgagccggagggccaggtggaacctggggccctgcggtaccgtatagagcagaagggtctgcagcacagactcatcctgcatgccgtcaagcaccaggacagcggtgccctggtcggcttcagctgccccggcgtgcaggactcagctgccctcacaatccaaggttggtgccagtggggacctgagtgggcagaaagggtcaagacacagaagtcctgttggcaaaacgaggcagatgctgtttttatttcttgtatctgggccaggagagcaaggagcatccatgatgggctgaggttgagggctcagaggtccggaaggccaatttcaacccacatgcaacatccagggcaccccttgttatcttgatatatgtcagcatcatatcccaattctctggagtgctttgtggtttacagaatcctgtcagatttgtcatctcatttgaaagacacagaccctggctgctagtccctgcctgcctcctgccatgttgtctaattgttgacattgtcatcgcaactttctacgtgccaggcgcagtcctaatcaccttacatacattaacacaatcttctcaatggccctataagataggttctttttttttttttgagatagagtctcactctgtcgcccaggctggagtgcaatggcgcgatctcggctcactgcaacctccaccttgtgggttcaagagattctcctgcctcagcctcccgagtagctgggactacagacatgcatcaccatgcccggcttgtttttgtattttagtagagatggggcttcgccatgttggccaggcttatctcaaacttaagataggttcttttgacattcccattttatagctggggaaacaggcagatacgttaagtgacttgctcaaagtacggagctaatgagcacaggtgctgaattatgaacccaggcagtcgggctcctgatcacactgtgccacctgttgaaagggggaaggaggggaatgaggcatccctgaggagaacagctggaggtggggcgctcaaagttcaaggatcacgctagcatttgccatgtcaccattgctggagtttgtaagaccaatcaaggaatctgtcggcacccatgcacggggtcttggggtgattcactgtcagcatcgcaggcagaggggccaggtgagacctgaccagcaaccagagcagcatttccaaaatgggatcccagttcactgacatcagaaccacctggagggctggtttataatgcagatttcctggcccctgcgtgcttgggaatccaagaattctgcatttttagcaggctccctaggaattcttatgcacagccaaagcactgctcttaagggttggtgtggaagcctaagcctatttttaaaaaccccaacaacagcagttgttccctctgatgcatccgacactgagcccatgcaccggagggaggggtgcttatctgtacttctccccacacagagagcccggtgcacatcctgagcccccaggacagggtgtcgttgaccttcacaacctcagagcgggtggtgctgacttgtgagctctcaagggtggacttcccggcaacctggtacaaggatgggcagaaggtggaggagagcgagttgctggtggtgaagatggatgggcgcaaacaccgtctgatcctgcctgaggccaaagtccaggacagtggcgagtttgagtgcaggacagaaggggtctcggccttcttcggcgtcactgtccaaggtcaggaagcatgccagcctgggctcctccagccaaggctgattgtggggccgcataagccatgccctctggtctgctgcctacttgggggagtcctttacagggagagtccagtggcccaggggacatgtttcagataactctgcacttgcttttttgtttcttgttttttttggagacaggctctcactctgttgccctggctggagggcagtggcgtgatctcagctcattgcaacctccgcctcctgggttaaagcgattctctcacctcagcctcccaagtagctgggactacaggtgcgcgccaccacgcccagctaatttttttattatttggtagagacggtttcactatgttggttaggtcacccctgacctcaaatgatctgcccgcctcagccttctaaaatgctgggattataggtatgagccaccatgcctggctttctttctttctttctttttttaagatgagggtctcactgttgcccaggctggccttgaactcctgtgctcaaacgatcctccttcctcagcctcctgagcagctgggattataggtgtgtgccacgcacagcgtgcctttgcctcctaaacccctgatacactaacactgtctcgctgtccacatagcctctgctgggttgggtgggggaacaaaatgcaattaaggggaggagagatgggagcaaacactttttggacacttactctgagccaagcactatgctaagtattttcaatatacactctttcatttaatcttcacaactcgatgaggggcaatatatctccagttcacaggcaaagaaatggaggctgtaagaggttatgtgacctccgtcacaccatagcttggcgacacacacaggattgttctgttcctgctgcctcagatagagtcaaacagaagcatcgagtgcagtcaccccgtggttctcacaaggcagtccgtaggctggctgctttaggaagctcctggaagctggttataaatccctggactgtccagagccccagtatccagggtggagcctgaagatcctttcctaacaagtgcagactctctgagagagcagcttgggaaccatggatcccactcatctcactgagtgggagtcctgttttccacactgtggcccctgcctgaatgcacccagtgacagggaacccactacctggagagtggctgtctcactgttgccacttgttggatcatccttcacctcctgcccaccctggggtctttctcgtaatagaggcagtaagcatggccctgatgtgacttgtgacagtgacctcccttcagcctagacaaatggtggctgccactctgtgaactctctgtgcttccttctctctatgtactcaccccgccacctctgatcctttggggacctacagagcactctggtgccacatgatctcctgccatgcctcacctgccatgccctcagcattccttgtcattgtccctgagtccctacacagcaggaccttagccctcctccagtgtcctcttgtgcagaaacagtgtctcctggccacacagctagtttggactcattgtgcgggggtgtctgtgcaatgccatctctgcttcccacccagatcctcccgtgcacatcgtggacccccgagaacatgtgttcgtgcatgccataacttccgagtgtgtcatgctggcctgtgaggtggaccgagaggacgcccctgtgcgttggtacaaggacgggcaggaggtggaggagagtgacttcgtggtgctggagaatgaggggccccatcgccgcctggtgctgcccgccacccagccctcagacgggggcgagtttcagtgcgtcgctggagatgagtgtgcctacttcactgtcaccatcacaggtggggggccaggtgggcctcggaggcacaggggaaggtgcccctgctcccactggaacagctgccacaccttcactcccaggccactgttccccgcccctactgccctccccctggcagatcggacctcctccctttctcctcaagctatggtctagtcacattcaggaaacgtgttatcataagcacattggtcttggctaaggaagcctggctttctctattctcctgaaaacctgtaccaagggaaatctctggggacagtgagtctattgcacggtagggcacagtctatggctggtggtctcatgcactatgggggcaaaaacatcttggaggatgatacccccagctcctccccccaaccctcctctcatcagttccacccttcataccgtccctgtcccaacccagagaatgtggagcgtttctacagccgaggctgaccccgtggtcccctctgtgcagctcctgcgcagcagaaagtctgctgtgcttttgtgacagctgtattcgtgtgtctctagctgtgagtaactgtcagctgctgtgagatttggtctcaggaaggtccctcttcaacacatggcctactttccaggggtagggaacacaacggggtcagggaggacggcagggcacacccctcatgcccggcagtggctgtccctgtcctccagacgtctcctcgtggatcgtgtatcccagcggcaaggtgtatgtggcagccgtgcgcctggagcgtgtggtgctgacctgtgagctatgccggccctgggcagaggtgcgctggaccaaggatggagaggaggtggtggagagccccgcgctgctcctgcagaaggaagacactgtccgccgcctggtgctgcccgctgtccagctcgaggactccggcgagtacttgtgtgaaattgacgatgagtcggcctccttcactgtcaccgtcacaggtgtgggcccagcccagctccccggggtcacagagacagccctgagccctggaggagctggccacatagccccagctagcaccccggggaggagggaggtgtgggctgcaggtgcatgtgccagggttcttgctgagatgagcccagggcccctattcaaggaaacaagcccctccccggtgcccaaggccaggcctagctctgctccacagctcatttactgagcactttccctgaatcaggcactgggagtagcaggtgagtaatgcaaatacggtccctattctgaatgagctgccaggctaggtgaggaggcagctgttaaccaggggtcgcaaacgggtagtcctggggccctgcgcattccacacatgtgctttgtttggtctgcagagtcttaccaaagtcaggacagttcaaataacaatccggagttatgcgtcctcttgaaaaagccgaagacccggcggctctggtcccgcttccccccatggcgacgaacagctggcactgagtagcagctgcccccatagtttggggcccacattcctctgtcccacctccctgccattgctttttgcctctccccagactgcttcagccgctaacctaacctggcccctgtgggcatttgagtttgcgacccctgtgttaaaccaataaacatgcaaataaatgtacagtgacacctggtgataa

SEQ ID NO: 269 - DNA, 12415 bp, Homo sapiens
  misc_feature (10652): n equals a,t,g, or c
gccctccgcacccccccctgcccccccaccgttcgccgctgcaggcggtcggccgccgcgatgaaggcgagctcgggggatcaggggagccccccgtgcttcctgcgcttcccgcggcctgtgcgggtggtaagtggcgccgaggccgagctcaagtgcgtggtcctgggggagccgccgcctgtagtggtgtgggagaagggcgggcagcagctggcggcctcggaacgcctgagcttcccggcggacggcgcggagcacggcctgctgctgaccgccgcactgcccaccgacgcgggggtctacgtgtgccgcgcccgcaacgcggccggcgaggcctacgcggcggccgccgtcaccgtgctggagccgccggcctccgaccccgagctgcagcccgccgagcgcccgctgccatcgccggggtccggggagggcgccccggtcttcctcacggggcctcgatcccagtgggtgctgcggggggcggaggtggtgctgacgtgccgggcggggggcctccccgagcccacactgtactgggagaaggacgggatggccctggacgaagtgtgggacagcagccacttcgcgctccagccgggccgcgccgaggacggccccggcgcgagcctggcactgcgcatcctggcggctcggctgccggattccggcgtctacgtgtgccacgcccgcaacgcgcacggccacgcgcaggcgggggcgctgctccaggtgcaccagccccccgagagcccgcccgcggaccccgacgaggcccccgcgccggtggtggagccgctcaagtgcgcgcctaagaccttctgggtgaacgagggcaagcacgccaagttccgctgctacgtgatgggcaagcccgagcccgagatcgaatggcactgggagggccgcccgctgctcccggaccgccgccgcctcatgtaccgcgaccgcgacggcggcttcgtgctcaaggtgctttactgccaggccaaggatcgtgggctctacgtctgcgccgcgcgcaactcggcgggccagacgctcagtgccgtgcagctgcacgtgaaaggtacggcggagcccgggacctagggaggggcctcgagtgtcctccgaggccctccgaactccagccctcctcggtgcccagcgctgcccccaagactggaggagaggtggtccgcgggaatattaaaataccaaacccgcccgcctctcactccccagggattcggatttagtaggtctccagggtactcaggaacttcttagcaaactccttaaatgattccgaggcagatggtggaacaccactaaggagtgattgatgtacaaatccggagggccctagaactcttcttccctagtggttttcaacgtctttgttattttactcctccttcccccactgaattcacaaccagagccccaatatatgagacagataaaggagtagtttatgggcgtaaattgctgagtctacgtatataacaggtacttctaaaccatcagtgagaataaggaggctattttattgaatacaggaatttgaattaaaggctgcattcatgagaccaggctctgaaccctgtggggacggcctggctgcatctgtcaccttgagaaacaagtgattcagtggaaagctagacttgagggaggacaaatgtcctgcgtgtttttactattctttgattaaactgctccccacgtttgcaagaagaggaaggtgaaggagagaaggtttatatttcaaagttgaatcaccaacaatatccaataaatggttacattctcataaacagaaaattccaaaggaaaaaaaagcacaccccaaactcaccagaaggtaacgctccccataataggatttcatcacaacgcaaaagagtacaccttcactagttattgtccagttttttctcttagaggaaaaaaagttggtaaattctcctgagtccttcctagcatgcagtcaagcatgttgcccccaggctgcggtggtggcctcactgttacagttcaatgctcacagattcatcaggttggtgctgatctggacctccatcaggaaagaaaagcccggagggaaggctagaggagcttccccgagttgcatacacacacgcacacaaaaacttgcttctccagcagccctagttaatcctctgatttccaacatcctgttttcttttcttttctttttttttttttgaaatacacttttgaaaagggttaaaatagctaggcacagtggctcaccctgtaatcccagcactttgggagactaaggtgggcggatcatttgaggtcaggagttcgagaacagcctggccaacatggcaaaaccccatctctactaaaaatacaaaatcattagccaggcgtggtggcgcctgcctgtaatcccagctctacttgagaggctgaggcaccagaattgcttgaacccaggaggtggaggttgcagtgagccgagattgcgcgactgcactccagcctgggcaacagagcgagactccatctcaaaaaaaaaaagagttaaaatattttaaattctactcagacccttgcagaatatgtgaaatgactggggcggggggagccagggaacagtttggaaatcaccaatctagggcctggaggaccccagggaacagtttggaaatcatcaatctggtccaaccccttctctccctttccccattttacaagtaaggagactgaggcccagaagcattgaaatggacttgcttaaggtgatgtggctagtgtcagggctggatgagaactcaggtcatcttaggaaccaccacttcccttctggtagttttctgtgattccacagtgcccgctggctctgcatgaagagcacacagcatgagctaatgcgcttctaggtatcctactcctagtctgggccttctccagagccctctcttgtctctctctcccctctccacagagccccgcctccggttcacacggcccctgcaggacgtggagggccgtgagcacgggattgccgtgctggaatgtaaagtacccaactcccgcatccccacggcctggttccgtgaggaccagcggctgctgccctgccgcaagtacgagcagatcgaagagggcactgtccggcgcctcatcatccacaggctgaaggcagacgatgatggtatctacctgtgcgagatgcggggccgggtgcgcaccgtggccaacgtcacagtcaaaggtcagctggcccgtggggaagaggctgaggcggaggcaggcaggtgctcagattccaggttgatggattcctgtccgcatctcagggcccatcctgaagcgcctgccccggaagctcgacgtcctggaaggagagaatgctgtgctgctagtggaaactctagaggccggggtcgagggacgctggagccgtgatggggaggagctgccggtcatctgccagagcagctcaggccacatgcatgccctggtccttccaggggtcacccgagaggatgctggcgaggtcacctttagcctgggcaactcccgtaccactacgcttctcagagtaaaatgtgagggcaggaaggcctctggacaggcgaggcagggcaggaggttggccagatgccggagctgggttggtgaagtagatttaaggtggaagggctgtggaggcccaagcaaggccggaacacatccctgccttggtctcaggtgtcaagcacagtcccccaggaccccccatattggcagagatgttcaagggccacaagaacacggtcctgttgacctggaagcctcccgagccagctcccgagaccccattcatctaccggctggagcggcaggaagtgggctctgaagactggattcagtgcttcagcatcgagaaagccggagccgtggaggtgccgggcgactgtgtgccctccgagggtgactaccgcttccgcatctgcacagtcagcggacatggccgtagtccccacgtggtgttccacggttctgctcaccttggtgagttggtcctgccagacccacccatcacttctcctcccttccccagccctcagtgctggtcctctcacaggcttgccatccgccagcctctgccctctgccacaccttctagttctgacagctgcactctgtccctgcctcagtgcccacagctcgcctggtggcaggtctggaggatgtgcaggtatacgacggggaagatgccgtcttctccctcgatctctccaccatcatccagggtacctggttccttaatggggaagagctcaagagtaacgagccggagggccaggtggaacctggggccctgcggtaccgtatagagcagaagggtctgcagcacagactcatcctgcatgccgtcaagcaccaggacagcggtgccctggtcggcttcagctgccccggcgtgcaggactcagctgccctcacaatccaaggttggtgccagtggggacctgagtgggcagaaagggtcaagacacagaagtcctgttggcaaaacgaggcagatgctgtttttatttcttgtatctgggccaggagagcaaggagcatccatgatgggctgaggttgagggctcagaggtccggaaggccaatttcaacccacatgcaacatccagggcaccccttgttatcttgatatatgtcagcatcatatcccaattctctggagtgctttgtggtttacagaatcctgtcagatttgtcatctcatttgaaagacacagaccctggctgctagtccctgcctgcctcctgccatgttgtctaattgttgacattgtcatcgcaactttctacgtgccaggcgcagtcctaatcaccttacatacattaacacaatcttctcaatggccctataagataggttctttttttttttttgagatagagtctcactctgtcgcccaggctggagtgcaatggcgcgatctcggctcactgcaacctccaccttgtgggttcaagagattctcctgcctcagcctcccgagtagctgggactacagacatgcatcaccatgcccggcttgtttttgtattttagtagagatggggcttcgccatgttggccaggcttatctcaaacttaagataggttcttttgacattcccattttatagctggggaaacaggcagatacgttaagtgacttgctcaaagtacggagctaatgagcacaggtgctgaattatgaacccaggcagtcgggctcctgatcacactgtgccacctgttgaaagggggaaggaggggaatgaggcatccctgaggagaacagctggaggtggggcgctcaaagttcaaggatcacgctagcatttgccatgtcaccattgctggagtttgtaagaccaatcaaggaatctgtcggcacccatgcacggggtcttggggtgattcactgtcagcatcgcaggcagaggggccaggtgagacctgaccagcaaccagagcagcatttccaaaatgggatcccagttcactgacatcagaaccacctggagggctggtttataatgcagatttcctggcccctgcgtgcttgggaatccaagaattctgcatttttagcaggctccctaggaattcttatgcacagccaaagcactgctcttaagggttggtgtggaagcctaagcctatttttaaaaaccccaacaacagcagttgttccctctgatgcatccgacactgagcccatgcaccggagggaggggtgcttatctgtacttctccccacacagagagcccggtgcacatcctgagcccccaggacagggtgtcgttgaccttcacaacctcagagcgggtggtgctgacttgtgagctctcaagggtggacttcccggcaacctggtacaaggatgggcagaaggtggaggagagcgagttgctggtggtgaagatggatgggcgcaaacaccgtctgatcctgcctgaggccaaagtccaggacagtggcgagtttgagtgcaggacagaaggggtctcggccttcttcggcgtcactgtccaaggtcaggaagcatgccagcctgggctcctccagccaaggctgattgtggggccgcataagccatgccctctggtctgctgcctacttgggggagtcctttacagggagagtccagtggcccaggggacatgtttcagataactctgcacttgcttttttgtttcttgttttttttggagacaggctctcactctgttgccctggctggagggcagtggcgtgatctcagctcattgcaacctccgcctcctgggttaaagcgattctctcacctcagcctcccaagtagctgggactacaggtgcgcgccaccacgcccagctaatttttttattatttggtagagacggtttcactatgttggttaggtcacccctgacctcaaatgatctgcccgcctcagccttctaaaatgctgggattataggtatgagccaccatgcctggctttctttctttctttctttttttaagatgagggtctcactgttgcccaggctggccttgaactcctgtgctcaaacgatcctccttcctcagcctcctgagcagctgggattataggtgtgtgccacgcacagcgtgcctttgcctcctaaacccctgatacactaacactgtctcgctgtccacatagcctctgctgggttgggtgggggaacaaaatgcaattaaggggaggagagatgggagcaaacactttttggacacttactctgagccaagcactatgctaagtattttcaatatacactctttcatttaatcttcacaactcgatgaggggcaatatatctccagttcacaggcaaagaaatggaggctgtaagaggttatgtgacctccgtcacaccatagcttggcgacacacacaggattgttctgttcctgctgcctcagatagagtcaaacagaagcatcgagtgcagtcaccccgtggttctcacaaggcagtccgtaggctggctgctttaggaagctcctggaagctggttataaatccctggactgtccagagccccagtatccagggtggagcctgaagatcctttcctaacaagtgcagactctctgagagagcagcttgggaaccatggatcccactcatctcactgagtgggagtcctgttttccacactgtggcccctgcctgaatgcacccagtgacagggaacccactacctggagagtggctgtctcactgttgccacttgttggatcatccttcacctcctgcccaccctggggtctttctcgtaatagaggcagtaagcatggccctgatgtgacttgtgacagtgacctcccttcagcctagacaaatggtggctgccactctgtgaactctctgtgcttccttctctctatgtactcaccccgccacctctgatcctttggggacctacagagcactctggtgccacatgatctcctgccatgcctcacctgccatgccctcagcattccttgtcattgtccctgagtccctacacagcaggaccttagccctcctccagtgtcctcttgtgcagaaacagtgtctcctggccacacagctagtttggactcattgtgcgggggtgtctgtgcaatgccatctctgcttcccacccagatcctcccgtgcacatcgtggacccccgagaacatgtgttcgtgcatgccataacttccgagtgtgtcatgctggcctgtgaggtggaccgagaggacgcccctgtgcgttggtacaaggacgggcaggaggtggaggagagtgacttcgtggtgctggagaatgaggggccccatcgccgcctggtgctgcccgccacccagccctcagacgggggcgagtttcagtgcgtcgctggagatgagtgtgcctacttcactgtcaccatcacaggtggggggccaggtgggcctcggaggcacaggggaaggtgcccctgctcccactggaacagctgccacaccttcactcccaggccactgttccccgcccctactgccctccccctggcagatcggacctcctccctttctcctcaagctatggtctagtcacattcaggaaacgtgttatcataagcacattggtcttggctaaggaagcctggctttctctattctcctgaaaacctgtaccaagggaaatctctggggacagtgagtctattgcagggtagggcagagtctagggctggtggtctcaggcactaggggggcaaaaacatttggaggaggagacccccagctcctccccccaaccctcctctcatcagttccacccttcataccgtccctgtcccaacccagagaatgtggagcgtttctacagccgaggctgaccccgtggtcccctctgtgcagctcctgcgcagcagaaagtctgctgtgcttttgtgacagctgtattcgtgtgtctctagctgtgagtaactgtcagctgctgtgagatttggtctcaggaaggtccctcttcaacacatggcctactttccaggggtagggaacacaacggggtcagggaggacggcagggcacacccctcatgcccggcagtggctgtccctgtcctccagacgtctcctcgtggatcgtgtatcccagcggcaaggtgtatgtggcagccgtgcgcctggagcgtgtggtgctgacctgtgagctatgccggccctgggcagaggtgcgctggaccaaggatggagaggaggtggtggagagccccgcgctgctcctgcagaaggaagacactgtccgccgcctggtgctgcccgctgtccagctcgaggactccggcgagtacttgtgtgaaattgacgatgagtcggcctccttcactgtcaccgtcacaggtgtgggcccagcccagctccccggggtcacagagacagccctgagccctggaggagctggccacatagccccagctagcaccccggggaggagggaggtgtgggctgcaggtgcatgtgccagggttcttgctgagatgagcccagggcccctattcaaggaaacaagcccctccccggtgcccaaggccaggcctagctctgctccacagctcatttactgagcactttccctgaatcaggcactgggagtagcaggtgagtaatgcaaatacggtccctattctgaatgagctgccaggctaggtgaggaggcagctgttaaccaggggtcgcaaacgggtagtcctggggccctgcgcattccacacatgtgctttgtttggtctgcagagtcttaccaaagtcaggacagttcaaataacaatccggagttatgcgtcctcttgaaaaagccgaagacccggcggctctggtcccgcttccccccatggcgacgaacagctggcactgagtagcagctgcccccatagtttggggcccacattcctctgtcccacctccctgccattgctttttgcctctccccagactgcttcagccgctaacctaacctggcccctgtgggcatttgagtttgcgacccctgtgttaaaccaataaacatgcaaataaatgtacagtgacacctggtgataagtactgtgagggccaagggcagagggctcaagagcacagagcaggagggtcagggaggcctgggagaaagtcacccttccacacacgggagccagcagcacgcagacacggccgcttccctctaggactgcacagcctggcaggaaagccagacgcattccaggatcttagagcatgggttgttgagggccagtctagggaccctggggctgggagccaccaccctggccaggcaacaggaagtgctttcaaagctgatactggagctaagtggggtggggtgtgggggaatattcaaagcgggagaagcacaggacaactgtggaagtgacggaggttcagtgccggagacctcggggtgacggctcacagcgcccagcccagtgtgtgtctggggctgggggtccatagggctaggcagctctggggggcacagaaccccagtggctgcactggagcccccatcctactgcggccacagtcctgtcctctcccagccctgccctgaaagtcacgccccatgcagagctgtttagggcccccctgctccttgcaccccagctaatgcactctacacacacaagcccacaatgcctaagaggccttctgcacatattctgccctgtcgtaatcatcttcaccctctcccacccagccatggccagacagaatggccacagccacacaaactccagcccatgctcaggctccccacaaacaccagtctcttcacagggaagttcacacaaacaccacctctgctctaggccagagcgaatcaagtctgacaccaagctgaggtcccggggctgggcagccacccggtcccatcactgcaccctgtcctcaccccactgccctcatcaccttccccactcctcaggcagctgcattctggtctctcctggccttgctcggccccagaggaccagcctgcatcccccagaccgttagagcaagcaagcccatgggggaggtgggttgtgtgggtcaaggcaggagtatctgtggaggttggggggctgagtgggagcttgtggttacgtcggtccatgcatgcccntataaaccacccccagcccccacccccccaaccctggcccctgattgggaagctagcagttcctcagcccagccaccagggggccagaggctaatggagcagtagtcgccccaaaacttgaagattctggggggacctgggggcagcaggggtgtgggcaggcctgggctccatgcgctggtcacctctaatattgacatggttccctttctgcagaggagtgaccagaacttggagatgagctcccagaatcagcatttagcacccctggggaactctcagacagacgttgaatgcaaaaagcattactgagttcctgcaagccttggcttggaattcctgccactacctgtggggtctgagcctccctttaacagagggtatttcctcctcctgccccagagtgggtgtagccagctgtgaccttaaggaagttgtataatcactctgtgcccagtcccttatatggaaaatggggacaaaacactaccttcctcttaggattgccgtgagagttaaatgtttcaagtgcttgggactgttcctggaccttaggaagtgtcatatcaatgtttgctattgtagatccaccatcccttatccatggttccaaaattccaaaactctcaaaatcaaaaggctttttgtaagttttgtattccaagtcatttcaggaaaacctgagcttgattgctctgaagctatttctatgctttaattatcctgctgagggtgaatatagctatagctgtatatctataagatatgagtgtcttatagatatatgcttgtatctgtaagattctgtatctttcaatctatcctgcttagggtgaatgtagtatgtgttataccacagacatgttaacgtgaccgatgaagggggaggctcccgtgggggctgaggaaggtatgtgatagatgagaaacgcatcatttctggaatccaaagcattctggattctgtaacaccctctggccccagggatttcagagaacaaactgtggacctattattgcttattattattttacttattattctcattattatgtgggtgatagggacttcatgctgccgaatggctccagagaggctgacggtgagcttgtgacaggctgtggttgtccccaccctgcagaacccccagtgcggatcatataccctcgcgatgaggtgaccttgatcgccgtgaccttggagtgtgtggtgctgatgtgtgaactgtctcgggaggatgcccctgtgcgctggtacaaggatgggctggaagtggaggagagcgaggccctggtgctggagagggatgggccacgctgccgcctggtgctacctgctgctcagcccgaggacgggggcgagtttgtatgtgatgctggagatgactcggccttcttcactgtcactgtcacaggtgggcagtctctgcagcacagagaggaggtagagaggtagggggctaagggacagacacccacctagccccacctcccccaccccatccccagccttccccttatccagcttcctcatgtttggccatcagaatcctgcttagccacatcaggtcaggaccagaggcctggtgggagggtgcccagcaattagaaccattcgttcattcatccattcgttcaatactcattgagcaactactatgtgcttggcactgttttatatgctggggatacagcagtgaaccaataagactaaacctcttgtcttcacagagtttaaactctggtgagggtggacagacaaa

SEQ ID NO: 270 - DNA, 20565 bp, Homo sapiens
tgagctgtagcacttttattgttccttgtctctctacccctgcccagggtaagggcaaacgccttccaagctgtccaagggcacccgcctggcctggttaggttctcctagttgcctgcagaggaatgactccacatggggctggggagagaagggggtaccaccttcctctcccctggcagagcctggacaccagtacacaaagagctgggcccccaggttctgccctaccctttctgggccttggttagggctgtcttggcggcaggaaggtgggggtcagctaggggtggggcacagcgcggcacctgaagggaatgctgggatttgggatagaaggtgggatgtctcttatggggaagaggaaagaaagaggcttctgccaaggctgacatggaacttgctgagatgggcagaggcaagctgggcagagggcaggaaggaggagggacaggctggaggaaggcagtgttggtgaagtggggaggaaaggaactggtagaaacagggctgttcaagagagacaaacatggtccagtggcaggagagaggagaagcctggcaagaaggggcgtagaaaggtgggaacagctgaccaggagcagctgatctgagccaagcagttccagggctttccagccctgggtgtgctctacccctcccctcccccatccccacctcctacgtatcccaggacccgttgccaccccaagttctggaaagcctcccataggtgtggcttaacccatcagctcccaggcgccctcaccctcctgccgctgcccagttggctttactcaccctctaccagcagccgtgtgtgggtgctgtcctggccggcctggcagcagtaagtgccttggtcctcaggtcgaacgtcatggatgaccaggctgtgggtggggccgtggctgcgcatctcatacttatctcccgggcacagctcggccccctcccgcagccagcacacgtggccccccgagcgggacacagtcacctccagcaccgcccggcggcccaccagaacggtcttctcgcgaggggggtggcggcacatctggagaggcaatgctgggggtagggggcgggggcttaagttaatagggacacgcatggcccccaggaggagagatgcatcttccctccctgaagtctccactcctggccttagccctctatgccaccagtccgttcccttgcacctcagacccaaagtctcctcttgccggggaaacgcgctgccctctgtgacccggcccaggagagcccctcggggggaagggaagagagaggcagcgttcttggggccagccccaagtccgtcagtcccatggcaggagagacaggatgtacactctctgtcgctcccaccccaggtgcttaccctccacttccagtagagccagggactgggcgggccccgcctggaagcggacttcaccggcgtcctcggcgcgcagctcgctaagcaccagaatgtgtttcttccctgggggtgagggggtcgctagcgaggccggagccacctctgaggagcgttggggacgaaggtgggggcccagcaggcccctgggtcggttcggacgccgttagtgtatgctagggtgggcggaacagggatgcggagcgggaagcctagaggtccgggactaggggctgggggcgggggaaagaacagggacgaggctcacagggccgtggggcggggcccgtcggagccaggggcggggcttgtcccggtggggcgggatctgttcgagcctgggcggggcagcgaggggcccgaaagggtaaccaggcgggcagaccttcctgtcggatgcggacgcgggctccgggtctcagcgggcggcctccgagctcccagcgccccgtggtctcgacctccgacacggtgcactcgaacgtagcgccgtcgccttcgcgggcgctcaccgaccgcagctcggagagtaccgccacagtacgctctggggcggagcccggggcgtgagcggggcggggcagagggcagttaccggtcacgccccctccacgccccctttctagaagcacgcgcggtcatcagggtccggggaagacagctccgcaagtctcgcgcccaaagcagtgcccagcctccacatcaccccgtacccaccgcgcacggtcaggcggaccggtccggcgcgggccgtccccaccgcgcagctgtaggtcccggcgtccgaggggccgcagcgtcgcagctggagaaggcggcgcgtgccgagggcctggagccggagccgcgggctaggcgtaagcgcgttcccgtcctaggggcgggagttgcagagggtcggggcgagcccggctgggcacaggcgaccccggccctggcaggcggcgcaccctttgttgatgccaagcggtctcgaggcgcgtttatgcgtgtctcgtgttcccaggctggggtcggactgtccccaagcctttggggtcgtgccaggagcctctttgaaaaagcgtcaccctttggggaccttagggccgccaaggcactcgggaagcccagagccaggtatcgatcacaggggacatgggcacggattctggagttaggcaaacctggattcgaatatgggctctacctgttgtctgcccttgggtaggtaatttttcccactgagcatcagtttcctgataggtattacagtgacaagacctacctcctagagttgtccttggagtaagggattaaatataatgcaaatcttagcacagtgccaggcacatccgctcaaggaatattagctgtttctgtctggggcattattatcgttggtgttacactgaagtgggcttggctggggctgggatctgaccttctcccaggtaacatcagccaaagcttgggaaagctcgcactcgaacgtagctgtgtcgccctcggtcacctctaggtcgtgtggcccccgcacgatggtcactgggacctctgggggtgggagagggaggacagtgcagagggagcaggatggggacccatcttgcagggacaaggaggacatacacttgggcacaacaggcagtagaggacactagcgagtggggttcgagctgggacaagtggtccaagaaggatctgtcagtggtgggggtgggggggatgtaggtgggcagggccacagggccaatgggttaggagtggccaactgggagtcacactttaaggtggtcagtgggggagaagctgggggccagagggcaatggggaaacaagcagagatgccagtggagtggtcagtgggaacatcctgggactggaagtaaaaatgggggacactcaagcagacttgctagtgatgtcgcccgtaggcagtcagtggattcaagggactggagtggtcacggggcccacacttaggcgggcagagggagccacggcagacagtgtagccagtagggtcacagttagagtggtcagtggggtggtgtgcaggcgggcagacagcagtgaccacaatggcaaaggcatgctcttggtagcagagtcagtggttggctgagccttgggcagtcaggggccacacccaggcagaggactctggggccacacagggcctatgagtcagggggatcacactctggcagggatgtcaatgagggccacactgagacaggcatggtcagtgggggtcacacgagttgggggtcagtattcatgcctggggtaagtagggccacacaggtcagcaggcaggctgtggtcctggaggccacacctctcacaatgagtctggctgcgcagcgcagggaatccgctgtgaaggagacacagcctgagtcggccaggcccaggccattgagtaccagtcggtgacggtggccgtccgagtggatgtgacacttgggtcctggatacagctgtactccaccccgggcccactccccggtcacaccttcctgggacagctccagctggaaggtggcactgcccccctcactgatggtcacgtcctccagaggccgcagcaccctcagctgcctcgctggccgggggagatggagagagggaggatgaggcctccagctctgggcaggggttgcagtcaatcctcatcccttggccctgcctacacccctgaacacccaacctaaggtcctgaccaaaaaagttcggaaccagggtgcaggaagaaaggagcacggtggacagatttggcggggggagggctgtatcagggttaggagatgagggcacaggaagggggagaagtgtggttagggggtcgtggagtctgggtgaggggtgctgtgacacttgaaggagcacggaatttggagtcagacacactaggaatggaacctcgctctaccacatagtttgtgtgctatgtgatctttggcaaatggcctgacctctctggaccccagttgccccagctgtacaaggtgaataacattgggacacaggtttattgtgatgatttcttgaatgaaataagttagaagagatgtgtcacaaatgacaaccattcaccaagctctgtgtaagaattttcatgttatctcagttaatgttcccagagacacttgagacggggatcaaccccatttttaaaatttgagacagggtcttgctgtcacccaggctggaatgccgtgacatgatcatagctcactatagcctcaacctcctgggttcaagcaatccttctgcctcagcctccctagtaactaccatgcccggctaatttttatttttttttgtggagatgggttcttgctatgttgcccaggatggcctcgaactcctggcctcaagggatcctcctgccttggcctcccaaagtgttaggattataggcgtgagccactgcacctggtctcagccccatttttaaggagacttggctcaaagaggttaacttgcatgaggtcacataggaaacagagggctccagctttgggtgggaggtgtggggtgctgtttgacagccatccctgctacttaagtgggtatgtgtatccctagaatacatgcctgaaggatgcccatggcaagtctttctggagaatatttgtgtttatagcaaagccgacttggaaatatgcaatggaatgcaaaatccacatggacttctaaggtaaataaaaaatattagaaaaagaaaagttttgctttgggcaagctgctgctgggacggccatgggtgacttttctcagcgatgaggggcactttggtgggggcctgagggactccaggacagccagaaaaggctgtggtgtagggtgggtaatgcattaagagaggacggggcactcacgcctcacgctgagcctggccagggtgcgatcgtggtggctctcgcagccgtaggtgccctggtcggccagtatgacaccatggatgaagaggcggtggatgtgcccatcctgggccatggacaggcgagagtcgtggggcaggggctgcccacctcgcacccagcgcacggcccccgctgcacccactcggcctgtctccacttcgagacacacatcctggccttcctctgcccgcacatcctgcaaccgccgtaggaacagcagctctgtctctggtggggaagaaggaggccatggagtctggtggggttggaggctggccccttgctccatcccactggtctgtccctaggtggagaggcaaggctgctggaatcctggttgggagtacaggcacgggacacagagtatctcatcctcatcaggacctaacctcgaacatggagccgggcacttgtggccgtgctccctgcccgcaaagtcacggtccctgcatcccccagttggcagcctcgcaaggttaagatgcggcttgaaccattctgggccatctccacctggggccctggagtgacgacggccccattgcgcagccaggtgacatcggcatctggtggggagacttcacaccggaacgtggcatcatcgccctcgtggacagtgagtggtgtcagctccgagaccagcttcaccagcagtggctctaaggggcacggtaaggcagtgagctgggctgagtcttttcttctctctccttttcatcccctcctcaggatgcaggccctcgtccccagtcatttaacagaccttctgtgaggacctactatgtatcgaccacaccgatggcccaaaggacaagatgccagctccctgccactccttttagtcagttcctcataatcctagcctagcaccccaccttggtggcaccctaataatatcaattaccagggaccctatttacagcatttacttgtcacaacaggcctataagaaaagcactatcccctcttttcagagccggggctcagacaggttgaacaacttggccaatgtcacacagctactggggcacagaatctaggctggaacctggctgggtggactctagagcccctgcttttaaccactggtttatgctgctctcaacatgagggtttctggaaagaggagccctgagcccctatccaagtgatggtcatgcacgcactggttggagccagaagcagcaaagcgggggtggaggagtaagggggccctagaaagtggcagatggtccttggggtgccacagcccacagggtgtgaggggtacactgttaccttccacgctgacaaggaagatgcggctgtcctggggcgcatcgcacaggtactccccagcgtccccgctccgtgccccctgcacccgcagcacctgcctggccccggcctgctccagctgcacccgcccctggcttgccagtcgctccccgtccttgtaccagcgtacagggccccctggcccggagaggtgcaccaccagctctaggtccccgcctggggtgctccgaaccctcgtctgggctgcctcgggagctaccacccgcacagggggctctgtggagtcagagctggaggtcactgggagggagaggctcagggctttgaggagggcacggggaggcatgacggggaaggtactgagagaagtggggccagggatgggcaaggcatgctggaaaagcaggaatcccgcagagtttggggtgccactctcaggcttggtgccactctcaggcttaatgcccaggctgtactcaccagccacctggacggtgaagctgaggcttggggctccgggggctgctccagactggcaggtgtagagccctgcatgggctgggcctgcagcctggatgcagaggactcggcgggggccctcggcatggagctctaggccctcgccctcctgcacgggcctcccattgtggctccagaccacgggggcgccagcccgggacagttcacagctcagcaccactggctccccaggggccacacagagcgggcttggagttgtctctagagcaaggaactgcactggaggctctggagaagagaggaaggtgtcatcccatgcttgcccttgcctccctgccctgggttggccaggagcacccaccagccaggatgacattgaaggtgatggcctcatgccgggtctcacacacatactccccggcgtcctcaggctgggcgtggggcagggtcagggtgcgggtgggcccctcggcacccagctgcagggcatctgatgcctccacttccagcccgtccttgtaccagcgcacctgagacccagctggggccacctcacagcgcagctccacgcgccctggagccccaaaatgcagatccagggagcgggctgccgggtgcacaatcctctctggtggggctggtgggtgggcatggagaggggcacataggcttggccagcaggcctctcctgcctcacccgccagatcctcagccctccccactggcagcacagctcttgagaacagtgccagctgcagtccatggagcagctgctgtgtgccaggcactgtcctaagaaccctgtgttttttcaatcagttactctgaccaccctcaagaggtgcacagctgctggctgcacttcatggctgaggacctgaggcctctttagaagaaactgacttgcctaaggtcacacagacagaaagaggcagatctagactcacacccagatctacacaccccactccacacccatccccacttcctatcccctttccctgccttgcctctgatgcacttgttaccacctgacaaaccatctcttttattttttgtctgtccaccctcaccagagtttaaactctgtgaagacaagaggtttagtcttattggttcactgctgtatccccagcatctaaaacagtgccaagcacatagtagttgctcaatgagtattgaacgaatggatgaatgaacgaatggttctaattgctgggcaccctcccaccaggcctctggtcctgacctgatgtggctaagcaggattctgatggccaaacatgaggaagctggataaggggaaggctggggatggggtgggggaggtggggctaggtgggtgtctgtcccttagccccctacctctctacctcctctctgtgctgcagagactgcccacctgtgacagtgacagtgaagaaggccgagtcatctccagcatcacatacaaactcgcccccgtcctcgggctgagcagcaggtagcaccaggcggcagcgtggcccatccctctccagcaccagggcctcgctctcctccacttccagcccatccttgtaccagcgcacaggggcatcctcccgagacagttcacacatcagcaccacacactccaaggtcacggcgatcaaggtcacctcatcgcgagggtatatgatccgcactgggggttctgcagggtggggacaaccacagcctgtcacaagctcaccgtcagcctctctggagccattcggcagcatgaagtccctatcacccacataataatgagaataataagtaaaataataataagcaataataggtccacagtttgttctctgaaatccctggggccagagggtgttacagaatccagaatgctttggattccagaaatgatgcgtttctcatctatcacataccttcctcagcccccacgggagcctcccccttcatcggtcacgttaacatgtctgtggtataacacatactacattcaccctaagcaggatagattgaaagatacagaatcttacagatacaagcatatatctataagacactcatatcttatagatatacagctatagctatattcaccctcagcaggataattaaagcatagaaatagcttcagagcaatcaagctcaggttttcctgaaatgacttggaatacaaaacttacaaaaagccttttgattttgagagttttggaattttggaaccatggataagggatggtggatctacaatagcaaacattgatatgacacttcctaaggtccaggaacagtcccaagcacttgaaacatttaactctcacggcaatcctaagaggaaggtagtgttttgtccccattttccatataagggactgggcacagagtgattatacaacttccttaaggtcacagctggctacacccactctggggcaggaggaggaaataccctctgttaaagggaggctcagaccccacaggtagtggcaggaattccaagccaaggcttgcaggaactcagtaatgctttttgcattcaacgtctgtctgagagttccccaggggtgctaaatgctgattctgggagctcatctccaagttctggtcactcctctgcagaaagggaaccatgtcaatattagaggtgaccagcgcatggagcccaggcctgcccacacccctgctgcccccaggtccccccagaatcttcaagttttggggcgactactgctccattagcctctggccccctggtggctgggctgaggaactgctagcttcccaatcaggggccagggttgggggggtgggggctgggggtggtttataggggcatgcatgggccgaggtaaccacaagctcccactcagccccccagcctccacggagactcctgccttgagccacacaacccacctcccccatgggcttgcttgctctaagggtctgggggatgcaggctggtcctctggggccgagcaaggccaggagagaccagaatgcagctgcctgaggagtggggaaggtgatgagggcagtggggtgaggacagggtgcagtgatgggaccgggtggctgcccagccccgggacctcagcttggtgtcagacttgattcgctctggcctagagcagaggtggtgtttgtgtgaacttccctgtgaagagactggtgtttgtggggagcctgagcatgggctggagtttgtgtggctgtggccattctgtctggccatggctgggtgggagagggtgaagatgattacgacagggcagaatatgtgcagaaggcctcttaggcattgtgggcttgtgtgtgtagagtgcattagctggggtgcaaggagcaggggggccctaaacagctctgcatggggcgtgactttcagggcagggctgggagaggacaggactgtggccgcagtaggatgggggctccagtgcagccactggggttctgtgccccccagagctgcctagccctatggacccccagccccagacacacactgggctgggcgctgtgagccgtcaccccgaggtctccggcactgaacctccgtcacttccacagttgtcctgtgcttctcccgctttgaatattcccccacaccccaccccacttagctccagtatcagctttgaaagcacttcctgttgcctggccagggtggtggctcccagccccagggtccctagactggccctcaacaacccatgctctaagatcctggaatgcgtctggctttcctgccaggctgtgcagtcctagagggaagcggccgtgtctgcgtgctgctggctcccgtgtgtggaagggtgactttctcccaggcctccctgaccctcctgctctgtgctcttgagccctctgcccttggccctcacagtacttatcaccaggtgtcactgtacatttatttgcatgtttattggtttaacacaggggtcgcaaactcaaatgcccacaggggccaggttaggttagcggctgaagcagtctggggagaggcaaaaagcaatggcagggaggtgggacagaggaatgtgggccccaaactatgggggcagctgctactcagtgccagctgttcgtcgccatggggggaagcgggaccagagccgccgggtcttcggctttttcaagaggacgcataactccggattgttatttgaactgtcctgactttggtaagactctgcagaccaaacaaagcacatgtgtggaatgcgcagggccccaggactacccgtttgcgacccctggttaacagctgcctcctcacctagcctggcagctcattcagaatagggaccgtatttgcattactcacctgctactcccagtgcctgattcagggaaagtgctcagtaaatgagctgtggagcagagctaggcctggccttgggcaccggggaggggcttgtttccttgaataggggccctgggctcatctcagcaagaaccctggcacatgcacctgcagcccacacctccctcctccccggggtgctagctggggctatgtggccagctcctccagggctcagggctgtctctgtgaccccggggagctgggctgggcccacacctgtgacggtgacagtgaaggaggccgactcatcgtcaatttcacacaagtactcgccggagtcctcgagctggacagcgggcagcaccaggcggcggacagtgtcttccttctgcaggagcagcgcggggctctccaccacctcctctccatccttggtccagcgcacctctgcccagggccggcatagctcacaggtcagcaccacacgctccaggcgcacggctgccacatacaccttgccgctgggatacacgatccacgaggagacgtctggaggacagggacagccactgccgggcatgaggggtgtgccctgccgtcctccctgaccccgttgtgttccctacccctggaaagtaggccatgtgttgaagagggaccttcctgagaccaaatctcacagcagctgacagttactcacagctagagacacacgaatacagctgtcacaaaagcacagcagactttctgctgcgcaggagctgcacagaggggaccacggggtcagcctcggctgtagaaacgctccacattctctgggttgggacagggacggtatgaagggtggaactgatgagaggagggttggggggaggagctgggggtctcctcctccaagatgtttttgcccccctagtgcctgagaccaccagccctagactctgccctaccctgcaatagactcactgtccccagagatttcccttggtacaggttttcaggagaatagagaaagccaggcttccttagccaagaccaatgtgcttatgataacacgtttcctgaatgtgactagaccatagcttgaggagaaagggaggaggtccgatctgccagggggagggcagtaggggcggggaacagtggcctgggagtgaaggtgtggcagctgttccagtgggagcaggggcaccttcccctgtgcctccgaggcccacctggccccccacctgtgatggtgacagtgaagtaggcacactcatctccagcgacgcactgaaactcgcccccgtctgagggctgggtggcgggcagcaccaggcggcgatggggcccctcattctccagcaccacgaagtcactctcctccacctcctgcccgtccttgtaccaacgcacaggggcgtcctctcggtccacctcacaggccagcatgacacactcggaagttatggcatgcacgaacacatgttctcgggggtccacgatgtgcacgggaggatctgggtgggaagcagagatggcattgcacagacacccccgcacaatgagtccaaactagctgtgtggccaggagacactgtttctgcacaagaggacactggaggagggctaaggtcctgctgtgtagggactcagggacaatgacaaggaatgctgagggcatggcaggtgaggcatggcaggagatcatgtggcaccagagtgctctgtaggtccccaaaggatcagaggtggcggggtgagtacatagagagaaggaagcacagagagttcacagagtggcagccaccatttgtctaggctgaagggaggtcactgtcacaagtcacatcagggccatgcttactgcctctattacgagaaagaccccagggtgggcaggaggtgaaggatgatccaacaagtggcaacagtgagacagccactctccaggtagtgggttccctgtcactgggtgcattcaggcaggggccacagtgtggaaaacaggactcccactcagtgagatgagtgggatccatggttcccaagctgctctctcagagagtctgcacttgttaggaaaggatcttcaggctccaccctggatactggggctctggacagtccagggatttataaccagcttccaggagcttcctaaagcagccagcctacggactgccttgtgagaaccacggggtgactgcactcgatgcttctgtttgactctatctgaggcagcaggaacagaacaatcctgtgtgtgtcgccaagctatggtgtgacggaggtcacataacctcttacagcctccatttctttgcctgtgaactggagatatattgcccctcatcgagttgtgaagattaaatgaaagagtgtatattgaaaatacttagcatagtgcttggctcagagtaagtgtccaaaaagtgtttgctcccatctctcctccccttaattgcattttgttcccccacccaacccagcagaggctatgtggacagcgagacagtgttagtgtatcaggggtttaggaggcaaaggcacgctgtgcgtggcacacacctataatcccagctgctcaggaggctgaggaaggaggatcgtttgagcacaggagttcaaggccagcctgggcaacagtgagaccctcatcttaaaaaaagaaagaaagaaagaaagccaggcatggtggctcatacctataatcccagcattttagaaggctgaggcgggcagatcatttgaggtcaggggtgacctaaccaacatagtgaaaccgtctctaccaaataataaaaaaattagctgggcgtggtggcgcgcacctgtagtcccagctacttgggaggctgaggtgagagaatcgctttaacccaggaggcggaggttgcaatgagctgagatcacgccactgccctccagccagggcaacagagtgagagcctgtctccaaaaaaaacaagaaacaaaaaagcaagtgcagagttatctgaaacatgtcccctgggccactggactctccctgtaaaggactcccccaagtaggcagcagaccagagggcatggcttatgcggccccacaatcagccttggctggaggagcccaggctggcatgcttcctgaccttggacagtgacgccgaagaaggccgagaccccttctgtcctgcactcaaactcgccactgtcctggactttggcctcaggcaggatcagacggtgtttgcgcccatccatcttcaccaccagcaactcgctctcctccaccttctgcccatccttgtaccaggttgccgggaagtccacccttgagagctcacaagtcagcaccacccgctctgaggttgtgaaggtcaacgacaccctgtcctgggggctcaggatgtgcaccgggctctctgtgtggggagaagtacagataagcacccctccctccggtgcatgggctcagtgtcggatgcatcagagggaacaactgctgttgttggggtttttaaaaataggcttaggcttccacaccaacccttaagagcagtgctttggctgtgcataagaattcctagggagcctgctaaaaatgcagaattcttggattcccaagcacgcaggggccaggaaatctgcattataaaccagccctccaggtggttctgatgtcagtgaactgggatcccattttggaaatgctgctctggttgctggtcaggtctcacctggcccctctgcctgcgatgctgacagtgaatcaccccaagaccccgtgcatgggtgccgacagattccttgattggtcttacaaactccagcaatggtgacatggcaaatgctagcgtgatccttgaactttgagcgccccacctccagctgttctcctcagggatgcctcattcccctccttccccctttcaacaggtggcacagtgtgatcaggagcccgactgcctgggttcataattcagcacctgtgctcattagctccgtactttgagcaagtcacttaacgtatctgcctgtttccccagctataaaatgggaatgtcaaaagaacctatcttaagtttgagataagcctggccaacatggcgaagccccatctctactaaaatacaaaaacaagccgggcatggtgatgcatgtctgtagtcccagctactcgggaggctgaggcaggagaatctcttgaacccacaaggtggaggttgcagtgagccgagatcgcgccattgcactccagcctgggcgacagagtgagactctatctcaaaaaaaaaaaaagaacctatcttatagggccattgagaagattgtgttaatgtatgtaaggtgattaggactgcgcctggcacgtagaaagttgcgatgacaatgtcaacaattagacaacatggcaggaggcaggcagggactagcagccagggtctgtgtctttcaaatgagatgacaaatctgacaggattctgtaaaccacaaagcactccagagaattgggatatgatgctgacatatatcaagataacaaggggtgccctggatgttgcatgtgggttgaaattggccttccggacctctgagccctcaacctcagcccatcatggatgctccttgctctcctggcccagatacaagaaataaaaacagcatctgcctcgttttgccaacaggacttctgtgtcttgaccctttctgcccactcaggtccccactggcaccaaccttggattgtgagggcagctgagtcctgcacgccggggcagctgaagccgaccagggcaccgctgtcctggtgcttgacggcatgcaggatgagtctgtgctgcagacccttctgctctatacggtaccgcagggccccaggttccacctggccctccggctcgttactcttgagctcttccccattaaggaaccaggtaccctggatgatggtggagagatcgagggagaagacggcatcttccccgtcgtatacctgcacatcctccagacctgccaccaggcgagctgtgggcactgaggcagggacagagtgcagctgtcagaactagaaggtgtggcagagggcagaggctggcggatggcaagcctgtgagaggaccagcactgagggctggggaagggaggagaagtgatgggtgggtctggcaggaccaactcaccaaggtgagcagaaccgtggaacaccacgtggggactacggccatgtccgctgactgtgcagatgcggaagcggtagtcaccctcggagggcacacagtcgcccggcacctccacggctccggctttctcgatgctgaagcactgaatccagtcttcagagcccacttcctgccgctccagccggtagatgaatggggtctcgggagctggctcgggaggcttccaggtcaacaggaccgtgttcttgtggcccttgaacatctctgccaatatggggggtcctgggggactgtgcttgacacctgagaccaaggcagggatgtgttccggccttgcttgggcctccacagcccttccaccttaaatctacttcaccaacccagctccggcatctggccaacctcctgccctgcctcgcctgtccagaggccttcctgccctcacattttactctgagaagcgtagtggtacgggagttgcccaggctaaaggtgacctcgccagcatcctctcgggtgacccctggaaggaccagggcatgcatgtggcctgagctgctctggcagatgaccggcagctcctccccatcacggctccagcgtccctcgaccccggcctctagagtttccactagcagcacagcattctctccttccaggacgtcgagcttccggggcaggcgcttcaggatgggccctgagatgcggacaggaatccatcaacctggaatctgagcacctgcctgcctccgcctcagcctcttccccacgggccagctgacctttgactgtgacgttggccacggtgcgcacccggccccgcatctcgcacaggtagataccatcatcgtctgccttcagcctgtggatgatgaggcgccggacagtgccctcttcgatctgctcgtacttgcggcagggcagcagccgctggtcctcacggaaccaggccgtggggatgcgggagttgggtactttacattccagcacggcaatcccgtgctcacggccctccacgtcctgcaggggccgtgtgaaccggaggcggggctctgtggagaggggagagagagacaagagagggctctggagaaggcccagactaggagtaggatacctagaagcgcattagctcatgctgtgtgctcttcatgcagagccagcgggcactgtggaatcacagaaaactaccagaagggaagtggtggttcctaagatgacctgagttctcatccagccctgacactagccacatcaccttaagcaagtccatttcaatgcttctgggcctcagtctccttacttgtaaaatggggaaagggagagaaggggttggaccagattgatgatttccaaactgttccctggggtcctccaggccctagattggtgatttccaaactgttccctggctccccccgccccagtcatttcacatattctgcaagggtctgagtagaatttaaaatattttaactctttttttttttgagatggagtctcgctctgttgcccaggctggagtgcagtcgcgcaatctcggctcactgcaacctccacctcctgggttcaagcaattctggtgcctcagcctctcaagtagagctgggattacaggcaggcgccaccacgcctggctaatgattttgtatttttagtagagatggggttttgccatgttggccaggctgttctcgaactcctgacctcaaatgatccgcccaccttagtctcccaaagtgctgggattacagggtgagccactgtgcctagctattttaacccttttcaaaagtgtatttcaaaaaaaaaaaaagaaaagaaaagaaaacaggatgttggaaatcagaggattaactagggctgctggagaagcaagtttttgtgtgcgtgtgtgtatgcaactcggggaagctcctctagccttccctccgggcttttctttcctgatggaggtccagatcagcaccaacctgatgaatctgtgagcattgaactgtaacagtgaggccaccaccgcagcctgggggcaacatgcttgactgcatgctaggaaggactcaggagaatttaccaactttttttcctctaagagaaaaaactggacaataactagtgaaggtgtactcttttgcgttgtgatgaaatcctattatggggagcgttaccttctggtgagtttggggtgtgcttttttttcctttggaattttctgtttatgagaatgtaaccatttattggatattgttggtgattcaactttgaaatataaaccttctctccttcaccttcctcttcttgcaaacgtggggagcagtttaatcaaagaatagtaaaaacacgcaggacatttgtcctccctcaagtctagctttccactgaatcacttgtttctcaaggtgacagatgcagccaggccgtccccacagggttcagagcctggtctcatgaatgcagcctttaattcaaattcctgtattcaataaaatagcctccttattctcactgatggtttagaagtacctgttatatacgtagactcagcaatttacgcccataaactactcctttatctgtctcatatattggggctctggttgtgaattcagtgggggaaggaggagtaaaataacaaagacgttgaaaaccactagggaagaagagttctagggccctccggatttgtacatcaatcactccttagtggtgttccaccatctgcctcggaatcatttaaggagtttgctaagaagttcctgagtaccctggagacctactaaatccgaatccctggggagtgagaggcgggcgggtttggtattttaatattcccgcggaccacctctcctccagtcttgggggcagcgctgggcaccgaggagggctggagttcggagggcctcggaggacactcgaggcccctccctaggtcccgggctccgccgtacctttcacgtgcagctgcacggcactgagcgtctggcccgccgagttgcgcgcggcgcagacgtagagcccacgatccttggcctggcagtaaagcaccttgagcacgaagccgccgtcgcggtcgcggtacatgaggcggcggcggtccgggagcagcgggcggccctcccagtgccattcgatctcgggctcgggcttgcccatcacgtagcagcggaacttggcgtgcttgccctcgttcacccagaaggtcttaggcgcgcacttgagcggctccaccaccggcgcgggggcctcgtcggggtccgcgggcgggctctcggggggctggtgcacctggagcagcgcccccgcctgcgcgtggccgtgcgcgttgcgggcgtggcacacgtagacgccggaatccggcagccgagccgccaggatgcgcagtgccaggctcgcgccggggccgtcctcggcgcggcccggctggagcgcgaagtggctgctgtcccacacttcgtccagggccatcccgtccttctcccagtacagtgtgggctcggggaggccccccgcccggcacgtcagcaccacctccgccccccgcagcacccactgggatcgaggccccgtgaggaagaccggggcgccctccccggaccccggcgatggcagcgggcgctcggcgggctgcagctcggggtcggaggccggcggctccagcacggtgacggcggccgccgcgtaggcctcgccggccgcgttgcgggcgcggcacacgtagacccccgcgtcggtgggcagtgcggcggtcagcagcaggccgtgctccgcgccgtccgccgggaagctcaggcgttccgaggccgccagctgctgcccgcccttctcccacaccactacaggcggcggctcccccaggaccacgcacttgagctcggcctcggcgccacttaccacccgcacaggccgcgggaagcgcaggaagcacggggggctcccctgatcccccgagctcgccttcatcgcggcggccgaccgcctgcagcggcgaacggtgggggggcaggggggggtgcggagggc

SEQ ID NO: 271 - DNA, 3422 bp, Homo sapiens
tgtcaagtcatatgcactgtgttctttattgagatagaagtggggtggggagggtagcccataggcagagaagtgaaaggagggaggagtgggagccatctatttcccaactctgcctttcctcccagctgatgatggtgggggcgtggccaccagccatgggattaagaaggaagaccccccacccttagatacaagcacagtgctgcgtgagaaggttgggcactgtctcatacttgaaagagtaacctccatccgaggtggtgcggacatgtaggggcctcatggtccctgggagagcagcacagcagggctgggcccctggcagcaaggagtagggctgggctggggtagggggagccccagggactggaagggacaggtttggtgggatgtgcagcccacaaccaccatgacagtagtggaagatgaaactgggagggtacacgatccaccgttcccagcccagctcctggaaggagatgttcagtgctactctgtggcagttggcatgggcagccggttcctccggaggcctctgcagcaggcgcagagcagagggagaccaaggccaggacatcaggggagttgagcgtcgggctctctcccctccactgggtggtctggtccgagtgtgggccaccaggaagggcgtggcctcaggccgggctgagcaggtacagaggggacagcgcagcagcagcaccaggacggggtgggtcagcagagagagagcagaggtggccaggtgcagcacggcccagtgagggggagcatggcccaaagacatgggcacagccacgggtcctcccggtgacagtgccagcaggcctagcaggggctcagagctattggaggctgctgtgccctgcctgtccagcccggtgtggaaccacagctgggctgaagtcacctggcggctgcgtgtatgctgggatggccggaacatgtatctgaagaggccctcctcagcctcctgggccagccctctggcagctgacttgtcctcacagctggcatctgcaggagacagaagaaaagggagagggcagccctgactggcaggacctggcacccctcctcttcagcaggagggatgtggccaccagtcatgagccaatgatgggctgcactctgctccacgccctccgggacgtggggactctcctgagttttgggagagcttctgtaggcttcccattttttaatttcatcatgaagggacttaaaaaaatagaagacattgccaacttctctctgaagtggttttaccaattaacatgcccatcagcagtgtgtaagaggccctctctccacttcaccagcactaagactttgtattagacttcaatgcttactcaccagatagtgtgaaacagtatcctgaatggtgtctacatggatggttgttatattcttttttttttttttttttgagacagagtcttactgtgtcacccaggctggagtgcagtggcatgatcacggctcactgcagcgtctacctcctgggctcaagcaatcctcccacctcagcctcctgagtaactgagaccacaggcgtgtgctaccacacctagctaacttttgtgggttttgtagagacagggtctcgctatgttgcccaggctgatctcaaactcctgagctcaagcaatctgcctgccttcaccttccaaagtgctgggattataggcgtgagccatcacacccagccatattaccattttttttttttttttgagatggagtctagctctgtcgcccaggctggagtgcagtggcgccatctcggctcactgcaacctctgccttccgctccgcctcccacgttcaagcaattctcctgcctcagcttcccgagtagctggtgccaccatgcctggctaattttttgtatttttagtagagacggggttcaccatgttagccaggatagtctcgatctcttgaccttgtgatcctcctgccttggcctcccaaagtgctgggagtacagacgtgagccaccgcgcccggcctatattactctttatatctttggcatgtcaggaatattgtaggataaattctttaaaataattccatttttaaaagacaggtttacaccaaaaaaaaaaaaaaaagaagaaggagggaaaggcaagtgggaaagggaagaaaatggagaacaaggaagagggggaagagaaggaggagggctgtaactcagaacagagggcagtcctttcaagaatgtgtagttagcatcctcacactgacacactcatagactatactaatcatcctggagcagcactcgttcatggactggcaattggaactatactgttacatggcttctctcattatctagtcacaattggtccattttgcagataaggaaactgaggcttagagaggtgaaatgacgttcaacgactaagtggccaggcttggattttgcctgatcccaaagccatccttctccccactgtgctgcgaacggactgaagtgagggaggcaggggtcctctctaagagaaaggtggaccagatgacaagaaagcccacccacaggagggcttatccattcagtcagtggaacaagggggcacatatatgttgagacaggaactcaagagaagatagactagttttccagaaaagtttcccaactaatcttttgcctgtatctctgatagcttctcagtgtcagctacctgggagtaaagaaacagggtttggagcagcgagcagaggcagagataggaggaaaggtggcaggaaggggctcaagcccaaatatctccatctttagagacccccggtctcccagcgcatacttcccaaatgcctcccacctgccatgcactctaggtacagcctctcacttaatcctgagaggtgggcattagcccattttacagatggggagacagaagcataaggaagtttagtaactggcctattgctgcaaagcaactgagtagcaggactaggattcaaacccaggtccgcctggcctgcaaacccatgctgtgccttgctttttctcaaagtcatcctgccggttcccccaccctcgttacctgtggctgggaaaaggatggcttgggagacatcctcctcttcctcgggctcagagcccctgtgtgtgaagccccccagggcatgtcttcggggcagccgcctgactccagggtccccaccttccctggtcaccgcggggggccccaaggcatccaagaacagggccctcaccttggccagaacaagttcccgggccagctccagcccctggcagctgtgcccaccctgtggggtcagcagcaagaagagcagtaggtgcagcaccatagctcacctggccctgctagtggggaactcacaccctgccccgtgccccttctgccagggtctgcccagggcctttccactct

SEQ ID NO: 272 - DNA, 11649 bp, Homo sapiens
tcacaagtccacacttggccagtttattaaaggcagggagcttcggcagggtccaaaagggagaagttgggagatgccccctcctcagctccctccttccccaacaactcttctacagcccagcccccagggcccagaggcagggctggcgtcaggcagactgtactgcataaatacgtggaggccacagcccgaatcagcagcgtcagggggcagggaaactgggtttgggatgagaagtgggtggctctgggggcacgtcccccagtgcttgtccagagcccagggacccacagagccagagaggggaccagtgggccagcttggggtctggctacggccagccctgcccagcgaggctggcaggtggctctggttttgggggagaagtggggtggggtgtggccatgccacggcccacggggacagggtggggtcaggtgctgttgccctgctcctgttcaaagagtagcatggccagctgggttcgggagccgaggccctcaagcacgctctggaggcagcggtggtacaggtcctcactgagcctcgcgctgcacgtctgggcccggtagcgctgcagcagcgccggctccaccgcccgcagcacatgcagactggagaagtggaggaacagctcgtacacatccaggctctccagcagctcctcttcttgttctgaggctgccgccaggcgcccacgggctgccacatagtcggagttgtagaagcaggcctcgctggctgcctggcgatcaaagcggccagtgtcacggcccagctctgggggcccaggcccttgtggtggggccacagctgggtggaaggcttggaaatgcatgggaaagaaggcctgccagccggagatggcatgcatgcggcagcggttcaggaagtcaggcgtgagcaccgtgtctggcccggccagcaggaacagtgtgtccagcgggtgcttcttggagagtagatccatgaggcgcagtggtgagggtgcggctgtctgcacactgagccatggcacccgggcaccggggaaacgccgctccagctctgccacgtgggccttgacaggtgcgaagacatctgcatgggccacgcgctgggcctggcgcggctcatacagtagcagcagggtcagggctgccgcagcatcaccaggctccagtgctgcagtggcaaaggcctccaagaagccaggggccaggtcacgctcagccgcagctagaggcagcagcacagtgagacgtgaggcctcagtgacatagggcacaggcaagatctccacgcggctcagcggccggagcagctgcactcggcgagtgaggggccggcggcctccctggggggtcagtgcctccagctgcaagtccagcgtgtattccataccccgggccggatcaaagcgtcggtagccattcaccagctgctgcttctggagccgcaaggccgggtggtagcggcggttcagctcctctagagctgtccccagaacatcggccacatcagcccggtcagccccacgcagtgggcagcggggtgagccatcggcgcaggagaaagcgtgctgctccgtgaagtagtcccagcgcagcacctcaaagcgggaggccgggcgggatggtgctggaatacccacgggccaagcagctgcctggtccccatcaacggccagatggctggtattctggatctcccactggatcagagaaacaggccatcagcaagggacagattacagggagcagcacacagctgggggactgggtaggcagtaggtgccactcaggatgggcccctcatcccctgccaacctctgcccatacctatcatttccccagcatagacagccaagaggctcatcagagaatgtagaaacaggcaggggctgggaagtagttttgttctgtgattctagtgctaacttgtcatttctctgggctctctgtgacttctcagatcctgtccccgtcactctgccacccccagacctagaccatacctgtaactcctggatctcctggtacgtgcgttccagttcagctcgggcgaaagctttgtgcagctggtacatgtgcacagggtcacgcacagggtgggctgtcagggcacttcggaaatgagggtccccctcctgcactggctccccagggctcagctccagatggctatagtgcaccccctggggagaggaagggaagggatctgtgatgagctggcattgtcttccgttgtctcatagtaagtgtctcatctcctcagcctatgacctgttgtggacttgcagtctgagggtttaagtctaccttgaccagttgtgagtctgtgtgaccttcagcatgcctccgctagctcatctgcgaaatgggcatgcgtcctgtctcagagctgtccaagggctaaaataataactaacatcaaatgcctattatgtacaaggctccctgattttttctaatccttgtaacaaccccgagcaataattatttccattggcacaaaggaagatactgaagcccaggatatttagtaatttactgggggtcacagagatagaaaataaatgtccgaattggcatggaaaagcagacctgtatctccaacatccctttgcctctcagagggatttgaacatgacaaggaggtatcagtgggatagcttatcatcccacctcgtggtcaccagtgcagcccaccccggtggcatcgagaatgcagcgacccagccactcgtcagggcgcgcactgacgatgtcgttgcggcagccttccaggtgggggcgcagttgttgcagcagcatgcgcgacagcagcaccccaaagcctccgtggcagtagcggccgggggtgggctctccgccgatgaagtcctggggccggcccaggtacaggtgggcggcggaggccaggctgaggtggccagttaggcgtgccaggccgtgcgcctcggtgtaggtggtgtcaggcaccaggaagaaccagtcaaagtcgtcgccgtgctgctccagcaggtggcgcagcgccaggtgcaggtgtccaatgggtcgctcctcgcctagcgtcaccactgccatgccaggtggggcccggcggccccgtgcgcccgtcaggaacaccacacgctccagccggtgccccagcgtgcggttcacggccacgcccagcgtgggcagcgtggtctgagaggtcagcaccgccaccagcagcctctgcctgatgcccagctccgtgctgatgtagcgggtcctaggggaggagatggcacaagcttatcaaaaggacaacggggcggggggtgggggggaggtggtcagcacagaccctggcaggtcacgtcttctctgtatctgttctctcacctatgaataggttaaaaataaaccctctctcccaggggtcatgaggatttaaacgaaatggtcttaaacaggtagtgctttgcatttgggagatggcaatacccacccagataggagagagatattgtgggtctgactccggggttcgctacttagtagttatgtccttgagcatgttatttaacctgagccatctgtaaaatgggactgattatatctgtttaaagcacccagccaaacgctggacacaccatgtatctactcatttctatataaatatgccattatgccacaaatgcctcacataaatgacataaaggaacgtttggcataggggtgtactgagtgtttttgcggggaggggcaaactgcactcaggggctctaggaacttaccttttggtaaggcagaaggtaaattgcagaaccagcatttgaacccaatgttacttagaagttatttcaactcatcagcagagacattaatgagataggtacattcctccctcccccatctcaccctgaggtggcccttgtaacccactcaggaacaagagatccaggtaaatcctagttctctcctttctcttcccctgtctctatacactcaccctatatataagtcatttctctaacaccagcagcccagccagggagctagtaggatctctggggcgccatcgggtcgagccggtttaggacacagtccagtaagttcagcccaggccgggatagggcccagagaaagtctcggactggccccacggctctcgggaaggcagggccatcggaagttatcggggcccaaagacttcctggctcgccagccccttccttccggagcctgacccgggcccgggcgacctccccgcgcgcttcccggccgctgcccagggggtagagcgggcgcagccgatcactacctgacggcctttttggcggcctggccgggctgtgcagggtggtagggcaagacgcgcggctcccaattctccccggcgccttcgccggccccgggcttctcgcgctccgctccgggctgcaccgagttgggccggcgcgccgcgttggtgttgccgcgcggcggcagctcagagtctccaggttggggcgggcctgggccgcacggctcctccacccaggtgacgctgagcaggctcagggtgaagcccagggagatgcccacggccacgggccctgcgggccgcagcaccgacagcagcagcgatgcccgcatggcgcccggaccgcgggtccccggccccggcgaacccccagagcagccagaggagtctccgagggggcgggaccggggagggggcggatccggagggctcgggccccgcgggcgggcccgctccctccccgcagagcagagccagcggcccgagccgaatccccggagccgcgcctcgattcccctccagcagctgctctgggctgcgcagggttcttgcgctcggcactggagcctcagccgcggccgcagctgtccgacgtgtcactgcaagggccccgcccccggggtggggtctcgggctctcgctaccggagagggaggagaagggggaggttaaaggggaaggacccccggaagtgccccctcctcagtgcgggagagggagacgccgggggcggagtcccctgcctcccgcggcgtggttggtgcgtcccatgtgacgtcagaagcagcccgcccctgcctggatggtgcgccctgagtgacgtcaggagcagaggccggagctgtccatcagcaccaaaggccgcgggcgggctcagggcatggggccgcggttctggggcggcccgagccccggctcctgcgccttccccttcctcaggcccagcccgagttcccggacgccgcgggactggagtgccagccggtgttggacgtggagcggcgccgccaccgcgccgacaccattctctccggcccagcagcccccttcctcgcacgacggactttccctggaccccagtcagttggagcctctggcgccccgcaaccccggcccctcgggcctctgcacagcctctttcactcagaagctcaggtcgcctccagcccaggtaaatcttggacaatcccatattgagccgcccacagatgaatctcttggctgcctccttctcactggcagcacgctcccttcatccccccgactcccgtccctcttttaacttcatcccagcctccactagccaggcacttttgtttccctttgtctttgctccccactccagagatgcttccggagctgcacaaatgtggatactattcctttgtccactgtccttgctgagttctcccaatccctctcccacccccatcctggtggggacccaggactcctccgtgaccccaactttccctctgtcaggttaacttgggagggtgactcccttctattcccagcactatgccggggactgtggcaacactgcggttccagctgctgccccctgagccagatgatgccttctggggtgcaccttgtgaacagcccctggagcgcaggtaccaggcactgccggccctcgtctgcatcatgtgctgtttgtttggagtcgtctactgcttcttcggtgagatccccatctcatccctcacctgggctccccagtgtttccccgagttctttttctgggcccccaagtcttctctgaatccctctaccatcatgaataattcttccttttctttcatcccacacatttatagattgtctagactctagattataggaaaaacaggtttttggattaggcacacctgagtgtgaatttacttagctttgcagttactaattgtgatgtcttgggcacattaatctgtctgagcctcagttttctcatctgaacaatgatcacaatatttgtctcatgtagtgttgtaagaattagtaagcattcaataaattgtagctattgtgaggatgtgtttggctaactgtgctaggtagccactgaaaacacttagcagggttattacacatggtcccttaccacagggcatattgtctgacagggaggagactccctggagcatttacacctgggatacatattagagtgggctggatggtggtcacacacatccatccagcctacaaggcaggctccggtaatcagagctgctgtgaatacttgtacaggacgggtactaaataagggagctcagctgagtgggcaagtgggggctaaagtccagctcatgctctgacaaactctgggccttggcacaaagctgctttgcctagagaaaggcacacctttttctaatatgcataaaggtgccagatgggctagtggcccagtataatgggagtaagtgaccagtggctttgcagcaagagttacagaacttcagagaggagagtgagctctatgggctgggggcccaaagaaagcctccaggagaattgtaggtgagtgggaccagtgggggcaaatgagtcttgggggctggggttccaggttgagcagaggtagtgcaagacttgtgttctgcagcctccccctgcaatgggtgggtagacagggttgggagccagatggtccctcccattcctcccccaaactctgggctgaacaactgaagagtaggcaggaggaagtgccccccgcaagggttcaggacacgttctgggcctccaaggattctgtatcacctcaccccctccatatctgtacccactccctctgcatgttgctcaatgcagcctcatattccctctcctgggcttcctgacatcctacccctcttggatgtcactacgcccaggctcatggactctgagcccttgtccacgccctactcctctctctgatcacgagcctcctggactctcatacttccccccactcctggaagtgactctcctctgttatctttctttttggctctctctgactccttgacccccatctctgatttccatctttccaactattcagaatctccacttccctcaccctttcaagtatctctaatgggcctaatggccctataacctccttatttctgaaactccacaaacactgtttccttctctttgattctgtgtgacctcatgtaagccttagtgacctccacctcctctcacctccagttatgtcattaccttccatccctctgaccccctctattactcctagtcttgatccctggttactcctctctaattcccataacctcattatctgatcacccctccccatactgtgatcccagtaattccttgttttggtctcagtgttcctctctcttggaaatcgttttatactctcgatgattctatttctgtcaatctccctaacctacaaatacctcattttctgggacaactccccagtaatgctgctactctgtcctctttgtaacctttcagtggtgccattatctctgaagccctgtgacccccaaagactcatctttctgaacctgtgtgaccctcacctctcaagtttctttttttttttttttttgagacaagagtctcgctctgtcacccaggctggaatgcaatggtgcgatcttggtgcactgcaacctctgcctcctgggttcaagcgattctcctgcctcagcctcctgagtagctgggattacaggtgcgtgccaccatgcccggctaatttttcgtatttttagtagagacggggtttcaccgcgttggtcaggctggtctcaaactcctgacctcatgattcacccgccttggcctcccatagtgctgccaccacgcccggccctcgagtttattatgatttccaaatacctcatctctgtgagcaatcccttctcaaagaccccaatgactctttttctgatccccttgggaccccagtgacttctctctctgactcctatgatcccaaagacaccaatgcacgaattcactcttgactcaaaagatttatcctaactcctgtgatcctcaaatacatcaaccctcatgatctcaatggttatgtttgccttcccattgaccaccaacagccatatctctctaacctcccctgacctcaatggccccatcactgatgccgtcatgactccagtgaccctcaattctctgatcttagtgtctttgtctctggttcccctgggatcccatgtccttgaccccttggacctgctccctccagcctggtgccctcatcttggcccctcactagcccctgttcccctccaggttaccgctgcttcaaggcagtgctctttctcactgggttgctgtttggctcggtggtcatcttcctcctctgctaccgagagcgggtgctagagacacagctgagtgctggggcgagcgcgggcatcgctctgggcatcgggctgctctgcgggctggtggccatgctagtgcgcagcgtgggcctcttcctggtggggctgctgctcggcctgctgctcgcagctgctgccctgctgggctccgcaccctactaccagccaggctccgtgtggggtccactggggctgttgctggggggcggcctgctctgtgccctgctcactctgcgctggccccgcccactcaccaccctggccaccgccgtgactggtgctgcgctgatcgccactgccgctgactacttcgccgagctgctactgctggggcgctacgtggtggagcgactccgggctgctcctgtgcccccactctgctggcgaagctgggccctgctggcactctggcccctgctcagcctgatgggcgttctggtgcagtggagggtgacagctgagggggactcccacacggaaggtaagggggcacaggccaaggtggacatgagaggagtgggtggccagggatgggttgggggccaagtgactggggagtgggggacagcagcagaaggcctcgatggcggtagagagctgacttgctcagggtctgggaggatagcacccaggtgccatcattcattccacaacaacatatggagtgctggctccgcaccaaccccattccaggcaccagggatacagcagagataacacagacaaggttcctgtccttatggattcaaggcaggcaggagacagataacagagatgcaaacaaacatgattccagttgtgtagagtgatatgacagagacattgtgcaggataatgtgaaagaatgacctatggaagctattagagttagggtggtcagggaaggctgcttgaaggaggtgatatgtaagcaggcacttgaaggctaaggggccagccatgcaaagagctagagaagagggaacagcaagggcgagggccctgagaaggaatgagctcagcttgcttgaggaagtggggcaggagtatgggaggtgaggtgtgggagccagagtgattgcgtggaccctctgggtcataagaagcactccacattttattagaagggcaataagactttaaaccactggagagtttaaagtaggggaggatagaatctaatttagcttttgggatgctcattctgctgccgagtgtagaaagcattggagggagcaagtgtagggggaaaccagtgaagaagcagctgtgattgtccagtggaaagatgatgatggctggcctaggtgattgggagagggatgacagcctggaagggggtacctggaagcctagcaaccttccataaagacctatggaagaaaagaacaacagcgggaagtctcctctgagaggtaggagaccaggaaaggaagtgacagggtgggagtaaggggttatggacaagaggaatctggaagcctagagccacaggtgggatgagagagggagggctcaagggaaacaaggcgcaccgtcctctgagctccttctctacccatcccaccacagtggtcatcagccggcagcgccgacgcgtgcaactgatgcggattcggcagcaggaagatcgcaaggagaaaaggcggaaaaagagacctcctcgggctcccctcagaggtccccgggctcctcccaggcctgggccaccagaccctgcttatcggcgcaggccagtgcccatcaaacgcttcaatggagacgtcctctccccggtgagctccctgagcccatccagccagaatgagaaggaagtgtggaaactctttccaaacaggactgggctttccccacgggctggttgctatctagaaggcctgtttgtccatgaactgtttgtccatgcatcggagcccatgcaccaggggcttggcgggtccagctggtgggggaattgggggaaaggttcctgagtatgggttttaagtgggatatggtatgtggtggggtctcagggctgtggactctgggtctatggcagtctatagaagtgtcaggcttgtgggaattcaggaagaggtggcttttagggcaggattctgcggtgggactcacacctatgtttgctcccccacagagctatatccagagcttccgagaccggcagaccgggagctccctgagctccttcatggcctcacccacagatgcggactatgagtatgggtcccggggacctctgacagcctgctcaggccccccagtgcgggtatagccatatctgtctgtctagactctgcagtcaccagctctgccagctcgaggaggcctgctaggctgccactcagcctcctggctttggctgtccctctccccagcctggagagggctggcctggtcactagaagggaggattgtctcaggcgagtcttggcctgagaggaaagccccctcccaagctcccaagaggctcctgaggaactcggggtgtgaaccccattggggtgtgctcagggttgtgagtgtgttgcccgtgtgtctgtgtgtatgtgtgtgggggtgggcaggcttggaggggacgctgggacccttgccttagatttctgactggtagggtttctccaggctcagccccacctcttcactccctgccaaggtcccatgggccacctcctgcatgtctccgcggaggggctaccttccttcccatcgccctgcctcgcagccagactcatctaagggttcttgtccttgtctatggggcaaactgtagcatccctcaccctggtcccctggcctctgtaaagccaccagcctgagggcagtggcaggagatgggggtgggggggtgctgctctgggctgggttgggaagggagttggggaggggtttaaatgcacggtgcatgtctggtgtctgtcatgccaacctagacacctcatgcttctgtctcccccaccccactctgttttacatcttttataaatgtgccaaactgtgtggcctctgccaggaa

SEQ ID NO: 273 - DNA, 3422 bp, Homo sapiens
agagtggaaaggccctgggcagaccctggcagaaggggcacggggcagggtgtgagttccccactagcagggccaggtgagctatggtgctgcacctactgctcttcttgctgctgaccccacagggtgggcacagctgccaggggctggagctggcccgggaacttgttctggccaaggtgagggccctgttcttggatgccttggggccccccgcggtgaccagggaaggtggggaccctggagtcaggcggctgccccgaagacatgccctggggggcttcacacacaggggctctgagcccgaggaagaggaggatgtctcccaagccatccttttcccagccacaggtaacgagggtgggggaaccggcaggatgactttgagaaaaagcaaggcacagcatgggtttgcaggccaggcggacctgggtttgaatcctagtcctgctactcagttgctttgcagcaataggccagttactaaacttccttatgcttctgtctccccatctgtaaaatgggctaatgcccacctctcaggattaagtgagaggctgtacctagagtgcatggcaggtgggaggcatttgggaagtatgcgctgggagaccgggggtctctaaagatggagatatttgggcttgagccccttcctgccacctttcctcctatctctgcctctgctcgctgctccaaaccctgtttctttactcccaggtagctgacactgagaagctatcagagatacaggcaaaagattagttgggaaacttttctggaaaactagtctatcttctcttgagttcctgtctcaacatatatgtgcccccttgttccactgactgaatggataagccctcctgtgggtgggctttcttgtcatctggtccacctttctcttagagaggacccctgcctccctcacttcagtccgttcgcagcacagtggggagaaggatggctttgggatcaggcaaaatccaagcctggccacttagtcgttgaacgtcatttcacctctctaagcctcagtttccttatctgcaaaatggaccaattgtgactagataatgagagaagccatgtaacagtatagttccaattgccagtccatgaacgagtgctgctccaggatgattagtatagtctatgagtgtgtcagtgtgaggatgctaactacacattcttgaaaggactgccctctgttctgagttacagccctcctccttctcttccccctcttccttgttctccattttcttccctttcccacttgcctttccctccttcttcttttttttttttttttggtgtaaacctgtcttttaaaaatggaattattttaaagaatttatcctacaatattcctgacatgccaaagatataaagagtaatataggccgggcgcggtggctcacgtctgtactcccagcactttgggaggccaaggcaggaggatcacaaggtcaagagatcgagactatcctggctaacatggtgaaccccgtctctactaaaaatacaaaaaattagccaggcatggtggcaccagctactcgggaagctgaggcaggagaattgcttgaacgtgggaggcggagcggaaggcagaggttgcagtgagccgagatggcgccactgcactccagcctgggcgacagagctagactccatctcaaaaaaaaaaaaaaaatggtaatatggctgggtgtgatggctcacgcctataatcccagcactttggaaggtgaaggcaggcagattgcttgagctcaggagtttgagatcagcctgggcaacatagcgagaccctgtctctacaaaacccacaaaagttagctaggtgtggtagcacacgcctgtggtctcagttactcaggaggctgaggtgggaggattgcttgagcccaggaggtagacgctgcagtgagccgtgatcatgccactgcactccagcctgggtgacacagtaagactctgtctcaaaaaaaaaaaaaaaaaagaatataacaaccatccatgtagacaccattcaggatactgtttcacactatctggtgagtaagcattgaagtctaatacaaagtcttagtgctggtgaagtggagagagggcctcttacacactgctgatgggcatgttaattggtaaaaccacttcagagagaagttggcaatgtcttctatttttttaagtcccttcatgatgaaattaaaaaatgggaagcctacagaagctctcccaaaactcaggagagtccccacgtcccggagggcgtggagcagagtgcagcccatcattggctcatgactggtggccacatccctcctgctgaagaggaggggtgccaggtcctgccagtcagggctgccctctcccttttcttctgtctcctgcagatgccagctgtgaggacaagtcagctgccagagggctggcccaggaggctgaggagggcctcttcagatacatgttccggccatcccagcatacacgcagccgccaggtgacttcagcccagctgtggttccacaccgggctggacaggcagggcacagcagcctccaatagctctgagcccctgctaggcctgctggcactgtcaccgggaggacccgtggctgtgcccatgtctttgggccatgctccccctcactgggccgtgctgcacctggccacctctgctctctctctgctgacccaccccgtcctggtgctgctgctgcgctgtcccctctgtacctgctcagcccggcctgaggccacgcccttcctggtggcccacactcggaccagaccacccagtggaggggagagagcccgacgctcaactcccctgatgtcctggccttggtctccctctgctctgcgcctgctgcagaggcctccggaggaaccggctgcccatgccaactgccacagagtagcactgaacatctccttccaggagctgggctgggaacggtggatcgtgtaccctcccagtttcatcttccactactgtcatggtggttgtgggctgcacatcccaccaaacctgtcccttccagtccctggggctccccctaccccagcccagccctactccttgctgccaggggcccagccctgctgtgctgctctcccagggaccatgaggcccctacatgtccgcaccacctcggatggaggttactctttcaagtatgagacagtgcccaaccttctcacgcagcactgtgcttgtatctaagggtggggggtcttccttcttaatcccatggctggtggccacgcccccaccatcatcagctgggaggaaaggcagagttgggaaatagatggctcccactcctccctcctttcacttctctgcctatgggctaccctccccaccccacttctatctcaataaagaacacagtgcatatgacttgaca

SEQ ID NO: 274 - DNA, 3152 bp, Homo sapiens
tctaaaaatcagatggggactttattgtgatggtggcaggtccaccagcagatgcaaatgtggggtgctgagagtggcaacacaggccaccccaaaccaacttcactccctcccctgtcctcagccagtacagaagccaaatgtagccccagccctagactccagcccaggcagagtccaagggaggggtgtcagggtcagaagtcacagggagcccagtgactatcaaggtggctgagagcaaggctagggtagggatggggcagagaaagggcaaggggtgcagccccaggtggcccaaagcaacacagaggagcaagggctggcattcaagtcagcaggtccctggggagaacagatggtgcctggagtcccacatggtggtacaggtgggggagctctcggtggcaggcagcaccccaggaggagtgggactcctgccgaggctgaccccaacttcaaggctgccaagttctgatgggagtgtcctcctccaggaacatctcccagcccccgacgagcagagccctggaggagtgggactcctgccctgaggctgaccccagttttggggctgccaggttctgatgggagtgtcctccaggaatgtcttcaggcccccagcgggcagagcccagaagggtctgagggcatgatgggcatcagtgggattttggttgtgccaggggtgggcagggccacccgtgagcaaaggccgcaggggtgggggctatgctgccaccaagcccctgggagaggggtgtggaggcggcctctgcatacgcccaggccaaattccaggaaagcgggaccagccgctggaaggggggtgagccccggagcatcaggagatgccccgaggagcacagacaggagaggtgcagctgctggcccagccaggagcccagggcctccctatttgcagttctccttccggaaccctggaagccaagggcgccaacgggttggcggctgtcctccaccctcatcacagtgggagacacagggcagacccccccgcaggactccccagggatttctgagcctgaggtggcaggggccccgggcctggctggtgcctgccatcgttggtcccaggtgaggtggaatggggacaggcagggctctgagatgggctgaggtcgcccccgccgctcacctttgtctaggtcgatgtacttggcaggcagggggctgtgggccagctccgccctctccttcaggatgttgtttttgtaatctgtgggaggagaggaggctgaggtccccgctcccaggatgcacttcccagcccgggactgggagccgcgcctgtgccctcgtgtcccagcactgcctcacctagctggatgtcctcactcctgtaaagcatctggtcccctgcagccacagcgaactccgccaagttaacatccttcctggatggcgagggtgggaggaggttacagctgggtggggtgaagggggccctggtccccaggagggccgggaggggggcactcacccctttgactttcccgacttctggtccgagtattcgtagcctgggaaggagactcacattgggggcagtgccgccccttccgcaggtcccccagcccagaggaccaccctcccgcccacctcagtctcctggggccgctggctttgccggggcagcctcacctccgcggcgcctgcgggcggccaggaggacagtgaccagtagcaggatgaagagcagcagcgtggccagcacgtagcccagctgctggaagaagtgggctcggctctcggggacgatgacattgatgacgttgtggccgcgcgccagtgtggggtctgcggggaacgcggggtcggggcggcgtcaggtaccagcaagacctgcgccccgacccgggccacggcccccgctgggatccgcgggcctcgggcaagggacagcgggcgcagagcaacccccggtggggtgggctcccgccttcccgggtcccagggaggcctccttcacctgggcctggggcgccgctgtggctggagccgttgcccggagagccccgggggggcggctccgcgtggggttcggcgaccgtcaggtggaagacgcggcgttcgtgcaggccacagtaatggtggtgcaggtggcaggagtaggtgccctcgtcggcgacctccagcggctcgatacgcagtgagaagtcaccgcgctcaaaggcatccgcgcccacagccacgcggtcgcgcagaaaaaggggcccgtaggcgcggcgctcgcccgacgcgtagaggtccagcaggcggtccgcgcggtcgtgcgggaccccgggcggctgccggtcccagtgcaccacctgttgagcctcctccacgtgccggtcggtccacacgtgcccgcggttcacgcaggtcagaagcgcgggtgcgccgcgcgccaccgccagcaccttcttctcgccgtcccagtaggcgggggtggccggggctgcggagggggcgcggtcagcggcgcgcgggccggggcggcggtcgagggtcgaggggcgggagctggggggcgggggggaagcactcacggccgtcggtgacctccaggcggacggccaggctctcgtagaggtggcagtagtgatggtgcaggttgcaggtgtacagccccgcgtccgtctcctccaccgctgcgcacccaggaggaagccgcgcgtgagccttgcggtgcccccgaccccgcggccccggacccctgccccgaccccgcggccccggtccccggtccccgcaccgcggatgagcagcgagaagttgccgtcgtcgaaggccgaggccgagagctccaggcggccgcggtcccgcgcctcgtacacgcgctgctcgcccgccgagtacaagtccagcaggcgccgcgcggggccacccccggggccgcgcaggtcccagtggagcacgcgctggcggtcgtgcagccggtcctgggtccacaccatgcgcgggatctggcagcgcagcaccgcccgggcgcccgcttccaagctcacggcggactcgaacaccacggagctgccagcagcggcgggtacccaggaaccctggtgggggaggggagtcggtgggggaggggtgggccccctagggccctggttgggggagtcagtgggggaggggcagggccctgg

SEQ ID NO: 275 - DNA, 308 bp, Homo sapiens
gaggatggggttgggtggtgacgccagcttcaagaagcagcagttagtcgctggtctgtgctgccaggaccccgggccacgggccttcctgctcccgccactcctcccaccgcctgaacttgtgctgagatcctgcacccaaccagctgatgcctgagcgggaaaggattctagggccagatccgtgctggcctggccaagactcttggaaccaccctgctgtcccgggctgtctctgctggagcctctttgctcccgccccctttgcaagtgtctgacccgcatcccactactcccgctcctcgtcc

SEQ ID NO: 276 - DNA, 3952 bp, Homo sapiens
cttcctttctgggctcggacctaggtcgcggcgacatggtgagtgtgggtctctgtgcggcctagaactctatctgcctgcatctgtccttgttttcttctcccgcacccatctcctctcctgccttaccccgtgttctctcctgtctccatgcctttgcaggagacaccattgtcggaagctccccaaggcggaggggcgggggcgccttggctgggcctggcgcgctccagccgggttaacgccgggccttcggagcgcgcggccagccctgggcactggtttcgttgggttgaatttagggaaaactaggtcatatgtaattcacatgtcggtcacacgtcagtgaggtggaggaacggtgtgtggaggctccagggcctgcctgggttccaggtctatcactggtttctcccttcactctaaacaggccaaacgtaccaagaaagtcgggatcgtcggtaaatacgggacccgctatggggcctccctccggaaaatggtgaagaaaattgaaatcagccagcacgccaagtacacttgctctttctgtggcaaagtaagtaaggcaaagtctctggtgagaggagagggagggcaggtttcttacccaagtgaggcctgacttcaaggtattttataagccgtgtgctggtgggcagttggaattactcataccgttgattatgagttttaagataaaagtgttgatggtaacttcagattttgtgagacgtttttcatttaaagaaaaccgcttaaacgttaatgggtaaaataatcatttgacagagtgcccccagcctaagccaaacctgctttgtgggaaatgattccatcagttttgtctactgatgtttctgcaccaactcccaagatgtctgtgcatctaataccattctacttgttctgcgagggatttttgtttgataaaggtttgaacgtttatgtgcaaaatactgcattacagcaatccctgttttgtttttgagggagaaagggaggctttcacatccctgacaataaggtgaatccaaatttagacttctggatgcttgtaagagaaaatacttacttggttcatagtgaaaattggttctcttttatagaccaagatgaagagacgagctgtggggatctggcactgtggttcctgcatgaagacagtggctggcggtgcctggacgtacaagtgagtctagttccttgtggtatttggaagtgtgtggaccacataggcccaaattccaggttgctgctggatgggctagttttaacactttctcaggactgagagaataaggatgcctttgtattttcaggattcttccgtggtggtttattttcagttattgaaagagtaaacacaaaactaccaaaatagaagtcggaaatctaattcacagactactttagaatttgatggtcactgggcacattgttgtgaacattgtcatgatactgtgcaggtccattagtggggctgaatctactgaacgttgatttgcactgcaagttttgataaaaataggtgaaggggtcagttagttcaaaactgtatttggaacttgaggccatcaggaccaccacagtttcgtctttctgaacagtattagactgctgcaggtttgtgaatctgcaactcagtatcacctgacagggcgatactacaaacactatactacaaactagcatctagacctgtgttgtccaatacactaagcacatatatggctagtgtaattaaagaattggattttaaagtttcagtcaatttaaacttaaaccgaagcagtggaaaatgttgaaatatatatatattccttgtgggggtttttattagggcagaatggaaaatgggaactagagtgctttcttggttctgataggaaagtgaattatttatatacttacaatacaggatggtgattttcaggtatagttcctgaattttatggtaaaacttttgtagtcatttcaatagctgtctttcccaaaggcactttagtgtccgctcttatttccttaatcattgttctcactgtatcatcttgtaatttattcatttcttgtaatctgtccattcccttttaataagtttaggtcagcctcttagaaccatttctttttcatgggatggggtagggggagttaaagcttgcttgtccacaactgagttacttataaaaaaaaaagcaactctggttgagaaatcagatgcatgagattgtatgtctaattctgcaagatcctgaaggcatggctcttaaaggatgccatcatgtagtttagaagccactaatttccgaggagtaatctaatgttggttagatctttggattgactgcagcaaagtattggtagagcagtctatctcagtataattctttctaggaaaatttgggaagcgactttaacacaaaaacgaggcagatttacttatttgccattttctatgttaacatgcttaattatgttggaaactgaatctttctttccagtaccacttccgctgtcacggtaaagtccgccatcagaagactgaaggagttgaaagaccagtagacgctcctctactctttgagacatcactggcctataataaatgggttaatttatgtaacaaaattgccttggcttgttaactttattagacattctgatgtttgcattgtgtaaatactgttgtattggaaaagcatgccaagatggattattgtaattcagtgtcttttttagtagtcaaatggtaaaatgcagcataagaatataagtcttccaagttagatatgagtgttagctttttataagtctgctcctgccagtttgactttgagatacattggagccaactgtaaactttagtttttaaattacagttagtttttttgtttgtttttgaggcggagtctctgttacccaggctggagtgcagtataccagtcttggcccacttcaacctccacttcttaggttcaagcgattctcctgcctcagcctcctgagtagctgggattacaggcacgcaccaccatacctggctaatttttgtattttgagtagagatggagttttcaccacattggccaggctgttcttgaactgacctcaagcgatccacctgccttggccttccagagtgctgggattacaggtgtgagccaccacgcccagccttgcattttatatttttgtgatgtgtctaggctgggtgcggtgactcacgcctgaaatcccagcactttgggtggctgaggcaggtggattacttgaggccaggagattgagaccagtgtggccaacatagcaaaaacccgtctcgacgaaaaatacaaaaaatagcttggtatggtggcacatgcctgtaatcccagctactttggaggctcaggcacaagaatcacttgaacctacgaggcggaggttgcagtgggccaggatcgtgccactgcactttatttagccaggacaacactctgtctccaaaaaaaagtttctgaaggtaaaagatatactaaaggatatacatatactgcctcttctatgatgtttcatttgacctacaccatcagcatcttcaggaaacagtatgaaactaatttcacattaaatgttgcaaacgtctgcaattctccagtttttagtttgcacgtaaggattcgtaggattgatttcagattgacagatggttgtagtaacaaaaaaatgaattgccttggagaattcgagttattttaggcctgcctttgacacttttatgcacttaattcactgccaatttagtctaactcctcaaccatctgtggtatggacttctcagtcctcctaattggtatgtcttttatctatcccagagtcagtagtcctttaaggatgcaaatttaattcgataagaatgtggatttacttcatctttaggacagagtaaaaacctttatttcacttggtctga

SEQ ID NO: 277 - DNA, 1150 bp, Homo sapiens
ccaggtatgcaagttgactttaatacaattgtgaggaaaagtgaacaggtgcaaaattatttgagacagttaatattaagctttgggaacggaagctacttgttaccggacttctgattggaatcagggccacacaatgcctttcagctcccatggtctttcttggccctctaatcatggattctctcttacactcttattccagtagttttctgagcttcttattctctggattagccatcccctgaaaaaaggcaaccaaacttcctagtgtgtgtgttctacgtgaagaaagaagatcatgtgtctagttccagaacacaccctccccacccccggcctcaaccagaaatccaattcttccctgctgacccctttgagagacctggagggacagagaattgacggtgggtaaagggtaagatgttggagtttaagggttcaggcctggaccaggaagctgtcttaacagcctagtgtggggccatggaagtgagttctgaaatgaagtggaaggcaggccatccgcactgagatgcagcagctggaacacaaaactccaaggtgactgttaacttttccccagccttccaatctcagactttcctcaggaaacaccaggctcttctgaattagtcgcgagcagaaccatcgtcctttccttcagaactctgaccagtttgaaactgtctaacttcttaatgtggctatatgatcgtttgcagctggcctgcaacttgttctgggaatggaaccttggattttagtcaccactgtcgctagcatcctgcacagtcagccacttttagagagcataatgcagagggggaaataaatgagatttggaatagagacggggtttcaccctgctggccaggctggtctcgaactcctgacccaccccgcctcccaaagtgttagaatcacaagcgtgagccaccgcgcccggccccacaaatgtaagatttatgcacttctccaagccaagtgctgtgcatcgaatggaggaactcgtacctttgcaggattttgtgatatatgtgaaataatccggacatgcttctgctatggttgtttgtcgccatagtttgcgaatctgggtaaacctggatgagagagacgccttacaattgcaaacatttctcaggag

SEQ ID NO: 278 - DNA, 450 bp, Homo sapiens
atctcatttgtgtcacaaaatggtactcctactgattttgtaatgtgaagcaagtactgtgggtcagtaggggtaggaccaggagtgacaagtcaggattttcaggcttcataggaatgacacagctctccaggtgaatctcctggagaattctccataggatctccaggtgagtgaccaggatttcatgtaagcatagggaattgaatgagcattagatggtctaatgctgcggttaagaacaccaacttagccaaactgcctagatagttgggtgacttgggttaagtgacttaacctctctgcttcagtttcctgtataattcttggtagtagaatggagtatatgctgggtgtttggattattaatttggagtcttacaaagctgctatgttacatgattaggcatggaaaacttcggtttttataatcagtgaagtactgctttt

SEQ ID NO: 279 - DNA, 5430 bp, Homo sapiens
  misc_feature (3906): n equals a,t,g, or c
  misc_feature (3933): n equals a,t,g, or c
ttggttacaaagcggtttaatagagatttatttccaaggcttgttttccatgaaacagtcaaaaatacttcacagaagtagttgcttaaggctctgtgggggtacgggttctcctggactccggaggttgaggggtgagaagggactcccaggcttccctgagatcaataggaggcagctaaaggggacggcacacaggcggatgaagggagtagtggaaaataggccgagccctgaaggctgcaataggtgatgaggacccttggagaggcctgaggatgctctgtggggctggcgagatgtgagccacaggtggagggcccaatggcagggaagggtcacagatggtcagtggcggggctgggatcacagggtaaagacgcggagagctgagatacccacaaggtggatatccgagattggagacccataggtagaggtgggtaagagaatgaaggcaaaggacaggagagtttgggatgatggtgggttaaaggactacaggtcaggtgacccagagctgcagggggaagaaaaggagtaggatagagagggcagttgagccttgggcagaattacctgatgcggggaccacggccactccacctcggctggcgctgtcagtgggcagcactggctgggcctgcactgaggtccctgctggggcagttcttccagaattatcttcagagggggcctccagctccctggtaccctcaggggcccgtgtggctggaagcagggaaggggcaccctcggagcttcctgtctcctcgctctctcctcgagggaccccagatagctcaggaccaccagttgcctcccccacctctcttgcctcaaccagagtggaaggtgatggggatgctaggttcctctccctgggagtgggcagagtctcagtaggtggtccatggacccttggaggcctggaagcttctgactctccatcaggaagtggtgatgcaccaggctgcaggactgcccttgctggcgcctgggagagtgactcctcctgggctgctggctcagtggggagagaggcctcagggcccgggctgctgagctcgctgggccatgcccacagagcctcatcctccacctcctcctcttcttcttcctcctctttctcttcttcatcttcatatttctcttcttcctccaatgccttaccttcctcttctgagaaccccgtgggcggtaccatggattgtgtttcaaattctaggcaaagcacaaacggttcagcaccagggacagcgtctgtccaaggaccgaaaggaaaaagggaaggggagaaaagtagggctcaggagggtgagccctggggaatagggaagagaccgccctgaggacaggtggtccttgcgccacactggaagaacttgaccccagccatattgttgaggcaacacttgagaaggctctgtgagccatcattagccccggagaacatggtcatttgtctccctcctactctgtcaaaactctagtctgttttgggtgtgtgaggcggaagagggaccaaagaaggcaggttccacctttccagggcgcagctccttagtgcaagcatctctagctccatagagttgggggtggaatttactggaaaagcaaaggttgggagagggacaggaaaggtgccctgcacccctgagctactgagaaaggacagggcagagtcatgtcatccatcaccctagcatcaacctgggcttgcctcttctgcccccaacttctttcaatcaagacatccttaggataagggatccgacttacctaggagcgtcctaggggcctctgctgggtcttctggagtggagcttccacctcctccgtcctccatgatggggatggagtagatggccccacgggattcactctctgtggcttcctgaggcagctgcagttcctccagggtctctgtcactgtgacgatagcctctagtccatcagaggctgggttggaggctgggttggaggcctcagggatggcagaaggctgggccgagtctgtggcaggaggaaagtattgatgcgagcctgaataggtagctctgccctcccaggtcacagcttgcaccatggaattctctcaattctctcacatcttccctgtggagcacctactggggcccagggagcatcccagaacttcgtcactcatttctcaagcattcatcaagtgcctacagtgtgtcatgccaagcattcccctgggcactgaggatacagtgcagaacaaaatagcaaacctcctaccctcaagggaaattatattctagaacagatgacaaacaaacatatattataatcttacaagataaagaacacttgagcagagttagaagatggagtgatggaaaatactactttggagtggtcaggaaaggctcaggtgagagatattccctagggggaggggctggagccagcaggatggatgaaatagctttaccaccttgtgatcttgggcttggggcaaggtgtgaggtgtcccaggtatccccaaattcttttattttttagacagagtctccttctgtcacccaggctggagtgcagtggcacgatcccagctcattgcaaccttcgcctcctggattcaagcggttctcccgtctcagcctcccaagtagctgggactacaggcatgtgccaccgtaactggctaatttttgtatttttagtagagacagggtttccccgtgtttgccaggctgatctcgaactcctggcctcaagtggtcttggcctcccaaagtgctgggattacaggcatgagccactgcaccgagcctccaaaattcttgaaatagaaggggagaggctgtcatcccctcaggatagctggagggcagagtgcaggaataacttcaggcatcacctgaggatctcagtggtggggcaagtaggcaagggaaaaggccacctccttctgggacctactcctttcaaataaccagaagtttagaatggtttacttgtcctctggggaagggagccaagagcagaaaaccaatgaagtgaaggtggaattgggctaagaaaagtcctgagggctgtctgtgctcagccaggcaagacaggacagtgagtccctgccctcatcacctgctccagtgagccttactcctcaccagaccttgtgtccttgctgcctgtgtcctccaccaatcgtagtcccaactgtagtcatattccccctcccctgcccctcctcatgatccaggccatttctttccaaaacagtgcttggcttggcacacaatcatagccagcacacagaagttttagctattactattattattattactactactactactactactactacccctgttccaggaggtcttttcagatggacctgtcttcctatggacttttacttccccacccctccccaaccccagccaaatatgtccacagatctgtccaaatggaagtaatgcttttctctcagtctctcctcatcctgggagtgaggcatcttgtcttccctttgctgggggttcccatggcaaaagctgtgtcttcatccttcagaccaagtgctccctgaggttcaaggctgtgtctgctccttccatttctgcttccagctcttgtaacagtatttcaggcttaaaactggggaaggaccgagacaccgcatggcaatgcctctcttattgtcggtcacccttggcctgggccttttgcatctgagagtcccagaaactgcctcccgctccagctcccaacataagatatgggcaggtttgggtgcagtggctcacacctataaatcccagcacttcgggagtccaagataggtagattgcttgagctcaggagttcaagaccagcctgggcatgtggtgaaaccccatctttacttttgggggaaaaatttgntagacatggtgggataagcctgtggtnccacctactacggaggttgaagtggaaggatcccctgagcccagggaggttgagggtacaatgaaccatgatgacactagtgaactacagcctgggggacggagtgagaccctgtgttaaaaaaagaaacaaggccataagatgtgggcagaaagctatgtctattaccaactgtacttaaggacttggtccttttgggggaattgtatccattcaccagtatttggcagttaaagatctgacaccttcttaagctgtagtttctggaaatgctaaaaagggctagtgaggggatttggttgttgaaaggaagacgttggggaaattactcatacaattcacagaacgttttcaatatttgctctgccaataagctgacaggagatgggagcttattcagaaacccagctgtagcaaacaaggcatggactactggtgtgaaggcacataacgagaggccaaaccgcgactactccaagagcccattatcagacagacaccacaccagagggcatgcccagaattgaaaccctagatgacaagctggacttcacccacgaccacttcaggcaaatggcaaagccctgagctaaactgatcagactggggtagcgcttgtagggagcagacaagcctttctgagattggtctcagcttctgcagggaggtgggctcacctcggaagcagtagacgttgaagcggctgtgcttattggggaagccagtctggttggggaagaggaagagagtcttgacaccaggcaagcccccaccacagcgctggctgggtgtgacaatggggtagcgcacactgccatcagctagccaccctgggctgcagtggtccaggccaccataccaggctgcatacagttggcccgtggtggcaatctctgcaccccgctcctggcagtacgcccgtgcttcctccaatgtcagcttctctggagggtcacccaggaacagttctcctgggtggagaagagaaggctgggttatcaggcagctggtagctccttccactctggtctcccatgggaaccctgggcaagcttctccagttccctcatctgtggcagggagtcaactactctacttcataggatcatagtctgaatagaacctcaagatggatattagagctcaaagagatggggcccaaacttcttgttctgcagagtcatgcacagagtccacctggcaggtggtagatgagttaaactcggtatcctgctgcctggctgagactttggtcatgagcttgcctctgtgacagtgtttggagagagggacaccaattgtctccttactcctgcttgcccccttaaactcaggagggatagtaaggtcctgcagaggccccgggaggacctatgggcagcatgggagtaggaaattgtcacctgggaacctctcactcctaatcaccatttagtcttcagcataacagtacacatcatagagtcatccggtccaccacaccatagttccgacccc

SEQ ID NO: 280 - DNA, 7414 bp, Homo sapiens; identical to SEQ ID NO: 243

SEQ ID NO: 281 - DNA, 442 bp, Homo sapiens
ggcaaaccagtgagcattaacccttaggagtgcttggcatgggtgacacccaccatctgtaaacacgacttctcccaaggagtgacgcagaacaggatgtctgagggaggcactccgactccagccttcagagatcgccagggtggcacctggtgacgacaggctgatgcttgggtgccccggaaaaagtcatgtgtgtgaatgggggccccaaagccaacgcttcatccctgacagcctggtgcatttagaggggaactttttgtcccttggcaaggtgggtggaatttcaggttcatagggcaagggtattttagctttaatagatattgtcaaacagttttccaaagtcattgtacacactctgtgattctacttaagtaaagtttaaaaacaggcaaatcaaatctatggtgttcgaagtcaagacagtagttaccct

SEQ ID NO: 282 - DNA, 10236 bp, Homo sapiens; identical to SEQ ID NO: 242

SEQ ID NO: 283 - DNA, 12194 bp, Homo sapiens
tgatttttcctccttggtaaatcttccaaatttttcaatcatttctgccacaaatataacatccattttgtcagaaaagttggctgcttccacagtgtaagccagtaactgtcgagctgttgccacggcattggtaagattgaggggcatctacatttcaaaggcaaaaatgatcaacaaaacagtcattagcaaaatgatcaacacaatcctgacattttaactttgcatttcaaaacagcaacgaattaaaaactttattatttactcatcatggccttcttaaaatgctttacaaacccaagaaaactggaattttaatggaaactcactggagggaaattttttcaagcttggagtgaaatacaataatacataaaaatacatgaggttaacatgttgcaccatctatctcttctctgcctatccaaattctacacatacctcaactccaattgcttaataaagcctttcctgagtattcctgctgggaatgatcaatacctcccttggagctcctactgcacaagagtacgaactacttatttggcacttatctttattgccatgcactgccagtaatgttttacatgtgtttatctactgactctaacacggacttagcacctaacattgcaaaaggatttttaccaggtgctaaggggcaaaagaaaatacattacacaaaagccatcttccacttgcttatagtctggtaagttttaaaaagatgcatagaagcaaagataacaaaaagcacatgagtagttcaagtattctaagcaatcgctttcaacaaagtgattataaaatgaatccaagaggtggctttcaatgtgaactcgaaggatggttaggattctgtctggtggatacagattaaaaaaaagatattcaaacaaaggcacaaagggagatggtgactgcaaaggaaggattctatagagggccttgactagtgattaagatggacctgatcctgaagacagttaagtcaactaaagtaaaaacacaaaatccttatgttttgcctagtattaaaaaaaaaaaaaaaacttatgtatttggtttgaataccatgttttctccacaacccaagtaaacatgaagactttctagttacctgattaaacatataaagaactctagtgacatcatttgcatactgacagcgagaataatcatcatctgcccaaaagccacctctatcacatctgcgccaagcttttctctcatcctgtgggtttccgggatatatcccactgccatgggtgttccgcgtacactgcagatatgcagtaatgcctgccaatgttctgggccatctagagatgaagacaaaatagtacaagaaaatctaaatgacacgggtacatcaagaataacaacagcagagaaaaaaatcaaagatgaagatgtgtcatgtcaatacaaccctgacacgggtcatcaaaactgggctgggagaaacctttgttatttgaactctatgtctccaaaactgagaatgaaattcaacatgtttaatacaagttaccatggatgctcatcacaggaaccactaaatgacagtatcagtcacaccaaaacagaattcattacaaaaaccacataaatagatcaagcaacactaaactaaatcttattaatgcagtgggaatttaattgcataatatcttaaggagtgtcaaagacaaataattcattgatctataaacatttaattgctctatttttaaaaatgtaaagcactcaaaactatgagaatatagaaaatctaccataaatagtaaatatcatattaggattatttgataaaagatgttgaatgtaacaaaattaccaaatatcatatatttcacttaaaagcatgtactataaatattatagatcaatacctaatctacataaaagacttatccattggcaataataaatgttgatttccatatattgatgtcaagaataacttttttaaaaagagcaatggcaaactagctgagataaagatgttattattgcttctttactttggatttaaaagattaacaccaaagggttttcccacccttgaaacactgaggttagagacaggaggtaacaactgaacccattagagacaatgcaaactgggtaataaacaatctttatgctgcttcaaagaataacatatttccctttgttcatatcaactataaactcattttttaaatccctgaacataaataagatcaagtaaataagatatttaaagatgtcttaaagcacctttgaaagtaaagagagtttaaggtaaaagctgtcatctcttgcaaatcctaaactttctactaaaataaaaaaataaataaataactccctttgcttagattaacaaaccccacctgggattccatggctccccaagtttcaggctacccaacagctttcatttcccaaagtccttcttgcttgatttccagaagaactgaacaaggggagaaaattagataggtgtttcttctaattctgatgcctactgaactgccagtagtgaaaagtaccttagcaatataaaaccttccaaggttcatctataaaagagccactggggggaaaaaaaacagaaaataccttacttaacctgtttgaattttgtactcttttaccagaatatctccaatgtttccctaaggcaatggctcttacacaacaaaaccatttgttaaaaatgactctactttcagagattcttcaatcaacaggtctgagataaagttcaagcaccccttttgttcatctccatatgtgattctgaaatcattattctaaagggtagtcctcagacatgtgcagttctcaaattttgttactcaggacaggaaaccaataatgtgtcttagacaacagaaggatctgggacaaattaaacttttccccgtattttccacaacactgacctgaagtcacctttgttgtttaccaccctctctggaggacagtactgtgcagaactctctaataccacaatatccacagtcctcgtattattcccacgtttggtctggacatgacagccccaatttccagtagatccagcctgaatattagaaatggttagggcactgcataaagaaagattttaaaaagagagaaaatataattaggcaaaaaaggagacaataatgggtctcaatcattaatttagcaaatatttttgaatgcatattgtggggtaagcacttgctatataaaaatgaatttaaaaaatgattccttcctttaaatccttcaatctcaaggcaaaaaaggaaagagatctttaaaatacacaatcagggcaataagagacatatgaatcaaatgcaatgctatacgacgcatgagaattctccttgcagaaatagggagagcagaacactttacagaacaggaatggcaagtaatcccagcactctgggagacagaggcgggtggcaggagttcaagaccagcccagccttcaagatcagcctggcgaaaccctgtctacactaaaaatatttttaaaagttagccgggtgttgtggcagacacttgtaatcccagctgcttgggaggctgagtgaggctggaggatggcttgaacccaggaggcggaggttgcagtgagccaagagagcaccactgcactccagcctgggtgacagagcaagtctctgtttcatacacacaaaaaaagaacaggaatggcaagcccaaaggcagaaacatcgtcgtacattctttagcaaaacttagagaagtttccaagtcacatctcccttctcacagattctgaagaaaatattcaaacatgaaaaaagaagattattacgaatttacataattaagaaaatgtttaaggtaaaatataaagggttacactagaaacaaaccagttacctccctaaaagatttagtaaattaccaattaatactttcacaaaaggtttctgtgttaaggtatatttcaattcataaaacagctgtgtttctaaatggctgtcagtaaatccaatttccaagatgaaatcataattctctaatataaaacctattaattaaggagcaaatgtcagagccttcaattaacctttatttcccccacaggacccagtatgcgttgctgttatgtagacacaaatgataagaaataattagacagaaagtatgtatcattttaattaacttacaaaattatgtcttaaagtaaatacacatttgtccgatctcctaaatcattgacggctacagcaaatgttctaataaaggctcaagacacttttatattatgaatcatcaaagaaaatgttgtctttactaagttagaaaaataaacatactgtaattaatatttttaaaatagagtgacacaaaaaagagtttgacattaaatttaactttgtccaacattctactttataaggctttactgaactaggaagaagtatatttcgtcaatgaaaatcattccttaatccagaagttcccaaacactgtcttacttcactgacatagtaactttgtcatggtgccccaccccagctcaaaaaaataccgatggtggtttctattactaaattaaatcccccaaatgtctatctatattcaaatactttagtagccatttgaaaaaagtaacacacataaatttgaaataaaatttttattgtattcttaaataacaactacttcttaatgagatatgtgtgcctgctagacactctaaaattaatctaacctcagattcggatcagacaatgatgctcatttcttgttctacaatgacttttacacgtagcacttgctttgtaccacagtaactgtccaaagtccagcatcccaaacactataatggagtgtttctagttttcttactacttttttccccttcaatctccaaatctgcaaatgtttcctggataacttttagcaatacttttaatatctaaaaccaatcactggaataacatttccaggaatcctcaaggcagcagatttggagatttaaaaagaaagaagtagcttcaatttcaactcctaagaaaaatgctgtttcttactgatgaagaatcaaagacatggggagatcaatgaaaaatcaataggaatctcagattaaccaatgcaataaccacatatttctttcttttattattctggggcaaaatctaggtaaagaactgtctcaggcttcacatgaaagattttcactttagtcacatgtccctaccaaaaaaaatgttaggttaacttgttatccttagaattaactttttttgcattgctaaacataatttaaatttaagcatgacttgcagaaatagatttatacagtaaatctacttattttatagtcaaataatttagagttctaaattaatcaaagctcttctacatagaaaatggttctacttttaaaactttactattgaattatacatcaattattgtctgtttatacaataaactgcttagtgtacaatgtgatgaattctgacatatgtataggcatgtgaaattatcgctacagtaaaactagtgtaacaatgaatatatcatttcgaacgattaatcgtatctcctaataagggaattctgcttctagcaatcactgagtagctcatattaaatcacccttcccacagctaacaattatatgcccctgacaaattataaaatgacaatcatttgaacatatgaagattgatcaaaagcaggcaataactgaacaggagttgatatgagaaacaagggtttttggcactgggaagtaactagatttttttttaatggcttttgcccaagggtaggcctcactcaaatagaaactcacaatcttattggcttaaaaaatcagaagacagaggtagaaagaagtcaggctggaagcccaaacttctatgtataaaatgcaccaagatctcttactgatcctgaactacacttgcaggtagagagcagaaaccaagactttagcttctgcctaccagaggggacagagctaggagttagttcagccaagctaactgcctgaccaaacaaaagttagctcactttaggagaatataacagaatccagagtcagaggtcggcagactttttcttcaatggccagacagtacatattttaggctttgctggctacgaagcaatattaagaatattatgcagggaattatgtaaccatctgaaatgtaaccatttaaaaatataaataacattcttagtttatgggctccgtgggccagatttggttcatagactgtacctagccagcttctcctccacagcaaatcattcataacgtccagtctataatccaaaactgtcagacctataaacaatacttttttaaaaagaagaaaatatgaaccatatttaaaagaaaagcagccagtagcaataaccacaagattgcccacatgttggaattagcaggaaaggatttaaagcatctactctaaatgttggaagatataaatgaaaatatgcttctagtagacatgaaatctcaagaaaaattataaaatagccaactgcataagtcttgaatctcaactcagagaacccctgagatttgaatgtcaactcagaacctttagtttttcagtaatctttcatagcacccctgtgagtttgctgtgatgttaccctaggaggacctggcagagagtctgaaaactgcagctctactgaaataaaaatataagccaagttctaggtaggtggaaagaaagaagaaagggagtggaaaactcaatgtctaaaggtaaaaattttaccaaagtaaaatatctggtaagtgataatatcatatatattcttagtctattatactttataaagtatttttacttttaattattttggtattcacaccaattatgaggttgatagttcagatgttatattcttttatactagtaggtggagaagataagtaccttaaaatattgtatcagtcaatattttgactagagtcaatatcaggtgattactaaaagagaaaatgtaagcttagcagcaggaaatagttggaaattaggtttagcactaaaagtttacatttttcctccaaaaactttaaaaaagtcttcaatttctaaagtttctttgaaattaagtcttttctttaaaaactggatgaaaagatggctatttaattttagaagatgaataagaaccaggaaaaggaaatgccagatgtttgcatttttaaatacaagaagatgaaatattaattcaaattccactaaacattacacctccaaaaggataaataaaatacacaggcacaattcttcattcaaaaaaaaaaaaaaagtttaccttgcaatcaaggagcagttgtgaatcatgttcttttcaacaaaaataccttgcgattcatcggtttcaactattctcccatcctgataccacaacacttgcatgtcctgatcaatatatgaagccatgcactggaaaggaaggctgtctccttcaaacacaacttggcgatgagatggagtcatgtagaaagacggcaattcaagcggagggtctagagacaatcaaacaaagattcagtaaacaaatataatttccaaacaccataattaaaagttacagaaattctaggtaaaataataaaaacagaacaacaaatattcctcaataatcagcatgctactgctagtatcaaccaggctgctactgagtttagtgataacagattaaaacaaaattaaaaagaaacaatttcataaccagttctgacatttagagttattcctcttcagtggcatcctaagagtatcagatgattacagaaatgaactaaaagaacaagctgtgctctagaaaatggcatcagtgataagtaaatgttgatatttacaactttaaaatacactttggagactgcaatacctttgattacaacacgagtttttggctgtaaaactaatgcatgttcactccagaaaaatcagaacatttaaagaaaacagaaaaaaacagtatgttaagatcccatataccgtaaacagtttttaatcagttttttcctttcagtcagaaaaataaaatattttaaatatatgtacaaaaatgtacacaaatgacactagttcattaaaagacttctaaatatgtagtccatttttctaacatgacaattctacttttagtagtactgtatcctaaagaataatagaaaatatgcaaaaatgcatacaaagaaattagtccttccattatttatgaagcaagaaattattaacgagctaaatatgctgtaatagagaagttgttaaactatggcttcatctatacaatgaattgatatgcatctattttaaatgagaaaatacatttacattaattcaacttaaaaaaggttataaaatatcattagagtgtaacgatattttggttaaaaaatagaaaaaagtcgtagaagatgatacaaaaaggtcttaacactagctattttcagtcatgaacataaacatggtctttgtttctctgcttcttttatttatttgcacaaatcttaattttcattcagtgagcatattttacttgtgatacaacaataataataaagagaaaaggaaaaaaatatgatagcttatttccaaacaaagactaaactgggacctccccccatcactttaagactgtttttgttttatggggttgtgtgtgtaggtgtgctttttcgttttttgtttttgtttttgtttctttttcatttaacacgtggcaaatatgttatttccctcctttccccagatattcttcaaaatcatgattttcaatagctgcattcactgaatggatatgtcacaagtaattaaaccaatcccctatttttgagaatttaggatatgcttatacacagagtctgaagatttacatacaaagctgatcatttcctaagaattaactataagatacagaattactagatctaactgtatcagttattttttttttgagatggagtttcacttttgtcacccaggctgtagtgcaatggcacgatctcggctcactgaaacctccacctcctgggtttaagcaattctcctgcctcagcctctcgagtagctgaaattacagtcacctgccaccatgctcagctaatttttgtatttttagtagagacagggtttcaccatgttagccaggctagtctcaaactcctgacctcaagtgatccactgggattacaggtgtgagccaccgcgccctgcctgtatcagtcttttaagaacactgaaacatgttgcttcaaaaaggctgtatcgttcacattcccacccacacacaggatgtgggcatcctgagattgtgttactacagacaaattcacgagttgccaactgatggaaaatctgaaaatctattctttgaaattggtttgcataaagaaagctgatgtgaacctaaaaacagctaccttaaagacaactgaaaaaaaaaaggtcatttaatctagctggcttaatcgttggcataaactaaatattatcaaatccataatgattactggctgcatactagttctgtccaagtataaagagaatcttacaatttgtcaagaaaaacatggtagcaagtcaaaatatggtaaatgctttctcagtttggatttctcccttaccgcatgtcaacagctcctgcttcacgcctgtgactggttgggcctgcagtgacttaggataaacacacctggtatcccgtaccgtgatgttcttctcctttacccagcgatgcatccacagtatgttacagtcacacaaaagatactcagtctggaattccctgtaacatgcaaatacaacttagagattatagtgaataaaattaaatagcacttttgttttatattgggttacatttctggtggcaagcacaatactgttcacccataccatgcctaaagtacatttcatcaactagctacagtttctctccaaggagctgaattgcagagtgttggaccccaacactgttcttgctgatcccgggtttctgctttggatgaaattttgtaggcaaacaaagactctttggcagatatccctcttctatgcaacaagccactgaacaccagagttctggaataccaaatcccattcctttttgtctatcgaacttctacccatttatcatgcagtgtgtggcattaatattgaatcttgaagccatccccaattttccaccatcattgccacattcttggcctaaatgcctaccaactctgctgattctggcaatcaaacagcaacctaaagcaatacagattgttttatggctatattctgtatgtctaactagactgtgaacttccctagggtagggactgtttctgacccctcctgctatgtgccaagtgacactatagatatttacaaatgtaagagataaagacccaacaaatcaaaagcatacaaataagaatacctcagctttgatataaaagatagtaaagaaatgtctttatatgaggcaaaaagctttataatttggcacttgggtgcaagaagaagaaaggataaacaaagctgagatataagcacaaaatctcttaaatactataattactaagcactgactattcatgtgccacacatttgctaagtccagctaataacaatgaatgcaggaccctgttcatgccaacatggagggcatcatataatagaagaatcaaaatgtaaacataactaaaatagaatgcaacatgttctataaaaataaatcaacaaagtgcaataatgtttaagtgtgtgtgcttctaacacagctagagtgttggctcagggttcacctcagtagttttggcaaaaaagaataaggaaaaaagaaaaaggatctgatgtaatacagcacagaaaataaatttaaataataccagaaggaggacgtgacagactcctaattcctaagcaccactttatggtcagttcctaacactaccaggtaaaaacactggcaatttcccccatttgggggatgaaaatacttcccacgttcctgctacccagggtctcaaaagccagactagcttttgtcttttttatttcctaatctttgcagaaatggttgacctgagcccactaaataagccaaaaggagatgtttctgctcaaaggtagtcttctggataagaatggtaagggtgccaaaaagagaaacaagatggagtatggagtgtgagccaaagtgactccagaagtacacacacatgcctgctatgatggtgaggagctggttggggctcctaatagctattagctacatcccaaggaagactcctaaatgagatttaaatgacgggtgcaggaaaggaacagagatgagaggagaagtcagagtacagggaagagaggaatcaggagagaaaaactctttccctggaagaaagacactcaatcccataaattactcacaatgaaaacctgaacaacattatatttaactgtaattccaataagcttaggataatttatagtctgagatatgttaaggtttatctgaaaatagttactttcaaaataacttctatgcaatctctcagttaacaaaactgggggaaaaaaaatcaaccaattctaaagctacaagaaactgtaaatcagaacttaaactgatttcataaagtaagcattctaaatgaatatccctagaaacatcagtaataagctgtaagtttgattttaagtgggggggggggtttacaggataaaattaaattcctaaagtataaaatattcttacaaattcttcataggaagggttattttatactttggaaatttaattagtcaaacaaggcaacattttatgatttgaaaaaaaagtcaaaaagaaacaattaccagtttacttactctaaatatagattagagtaatatggtatcctaaggagaaaacagttgtcctagtctaaaccacattattcagggttactgtatgtttttcaatgtgaatgcaagctctcaagtgagactctaccttgacaagattgtcctcacaaagtctctgaaaccacataataaatgtttttaattttcaaaaagacatgaaaatcaaaaaaaaaaagagagaaaaaaattcttacttacaaagaccgtaatgacgcaagataatcaaaagttccttgagataatgaagaaaacaaattccccgaaaggttt

SEQ ID NO: 284 - DNA, 994 bp, Homo sapiens
tgatttttcctctttggtaaatcttccaagtttttcaatcatttccgccacaaatataacatccattttgtcagaaaagttggctgcttccacagtgtaagccagtaactgtagagctgttgccacggcattggtaagattgaggggcatctgattaaacatataaagaactctagtgacatcatttgcatactgacagcgagaataatcatcatctgcccaaaagccgcctctatcacatctgcgccaagcttttctctcatcctgtgggtttccgggatatatcccactgccatgggtgttctgcgtacactgcagatacgcagtaatgcccgccaatgttctgggccatctgaaatcacctttgttgtttaccaccctctctggaggacagtactgtgcagaactctctaataccacaatatccacagtcctcgtattattcccacgtttggtctggacatgacagccctaatttccagtagatccagcctgattattagaaacggttagggcacttgcaatcaaggagcagttgtgaatcacgttcttttcaacaaaaataccttgcgattcatcggtttcaactattctcccatcctgataccacaacacttgcatgtcctgatcaatatatgaagccatgcactggaaaggaaggctgtctccttcaaacacaacttggcgatgagatggagtcatgtagaaagacggcaattcaagcggagggtcgcatgtcaacagctcctgcttcacgcctgtgactggttgggcctgcagtgacttaggataaacacacctggtatcctgtaccgtgatgttcctctcctttacccagcgatgcatccacagtaggttacagtcacacaaaagatactcagtctggaattccaaagaccgtaatgaggaaagataatcaaaagttccttgaggtaatgaagaaaacaaattccccgaaaggtttagccgagccagattggtgagtcctcgaaat

SEQ ID NO: 285 - DNA, 445 bp, Homo sapiens
aaataattaaaactttaaaaaataacaaaaggaaaaggatggcctcaatgatcagcagcagtagcatactaaacatgactgaaaatatgaggggagcgggatgagttcagggcttaaaatgagagactggggatataattccacgttgctcttgggcacatcagttctctagtctatcctgtgttagcaggcttcaatacataacctgagtctcgcagcgttttgaatgaatggaactcagaaacccctattctacaatgtgagtggtttgttacacccaaaacgatttgaccgaattatttctttcataccggacgatgagctctagagctcgggggaggacggcctgtgtgtgtacgcacttccgtgtacagccagtaacatgctggaatataaatggtgctcaataattgcccattgctcaggatgtacacctcaacttcag

SEQ ID NO: 286 - DNA, 3284 bp, Homo sapiens
aggaggcggccctcgctgcgcagcgctgacccatccttgtgccaggacactgtggggaggcacagggacccggctcgccacggcccacaggcgcccactgagaatctctactcctaccccacacaccacacaggagaccaaacctctcctctcagcaccccagggaatctggaagagtccgccctcattttgggaagctcaggttgccctcccttctctcgggggtcctgagaaatgtccctgaacacacacccaagtcagggcagcccccgtggaggggataattcccctctttcccacccctcccttggaggagtccgggggaacctccccttcccttctcacacaccccctcccaacctcgaccgcaccttggcccagtgctggagctcaccttggggcggggggttggcagtgatgatacacttgagcagcacatctgcccctggtgccaccaccacattctgcagggggatctcaaacacaggggcctctaggggctcttctccagcggacacgtaggagtcatccgaagactctgccggacacaggaataacggggtaaggggccatgatccctgcagggatgacagcgggagagagagtcctggtggcctgcatcctagaaagccaaacccagacagaggggcttctagaaagcagggacttggggagaagagggtctgcctcctgaatgtccttagggaaaaaaggaagtcagaaggagcattctcgaaacaggtcagggcagccttgactccatgttagtgtggccgttcctcaacttcatccacaattagagcgttggcttctggagaaagacaggactgcactgtgtatgtctttaacacgtcagccatcatgtatggcgtaccaggccccatgcaaggcacctggaggggcacaagctttcaaacagacaaagaacaagctaaaagcaacccaagacttaagcaataacagcggtgtcacagagcaacacgaggtgaattgtcaaatgtgtgaagccgtcagattcaaaagagtgaatggtaggcagtctgagaggcctacgaagatcagatttgatttcatccgttcaccaaatagtgaccctgtactcccggcatactgagtactgtatgggtaccaagaacactagaggaaggaccagtggtccctgcttacaggaagctcatacatacagagagatgacaaactccactgtcatgggtctctgggcattctccaactctgacattccataagctagataaaggacaatgtacatagccaaaaaaagcagtgaaaatcccaattctgctgtttcctagctacaaaaccttgggcaaattagcctctctgagcctcagttttgttatctgtaagatggaggggaaaagaccctctgaaactgacatataggctgaaatgaaataacatctgtaagggcctagttaacacaatgctggcacatagttgtgtgtttgcaataatggtgtccaggaggatgatggacaggggcctaattatctctaaagattctaaggtggtaatacttaaatgcaaaataattttgatgaagaaaaatacagtatggtaagtgcaatgaaagagatcctggcagggtctcccaggagcagcaggtagaggcatctattctggaggagcagtggaagtgggtcaaggacgccttcctctgcctctctccaggagtgggcctcgagttgatgtgcaggatgaggggtggggtgcagagccattctcctgttggtggtgttggtcatcatccatgggaaggttgggagacaacacacaggcaggcattgtgtagggaccacagtgagctcagccatgcggggtgtaagcctgaggtgaggaggctagaagggcaggctgggtggccacacatgggtcaggggatggtgcccgggtgggagaggcagagtaaagagttatctggcacaaagcgtgtctgtaacagggatttgaaaattatttcagaccatctaccatctctccccaacagagggattgggggtatggaggggggtccttaggttcccaccagtgcatccccccagtagtggttcttgatccaacagcctagcaggccactggacccaggggagctatggcgggcatctgggcaccagtcttagctcacatctcagcctcacctagcctccatcacaacactcacgctctgcctcaccagtagcagtcctagcacaaggactttgacaatccttcactcaaagtcgagcctgtgtctgtgccttctttggcaaacccacccttgcagctggctagcagccccaggcgaaacccccgaccccccggctcctgctgagcagtcttgctctccacaaacgccccccgacgggggttcaggcaccttgtcagccctccctgaggccttaccgagctcaggggaggtgggccgggcccggcgacctttgccctggctgcgggcccctcggcggtcccagggcccccagggaccgtcctcctccggccctctgcgaagcctcttctctgcctcaggccccgccctgttcttctccaaggtctggggtacagcagcgccctccaggcccggcgtggcccagggcaggaagcgcacggcctgcgccgggggctcccgcttccgaccggggggtgctttcgtcctggcctctgggggatcggcggcggggggcggcacagggctcctgcactcctggatggctctgctccgggtcagcgggaattggtcccgacgcctaacctcctgctgcgggccttcccccggctctgtcctgcccgccggcccgcggctcctgggcctcccaggctcgtcccccggcttctccgcgctgctcggagagggcggctgggcggcggcggggctcacggcccgcgatgtcttgggggtggagggccgagagaagagcgggggctcgccgggctctcgaggggatggggcacgctgcagcgtggcgcgcagggactcgtgcgagcgcaccagctcctcccgcgacgtggagcggcggatgcggcccagctcctgggcgaagcgcagctcgaggtctgaggccgggctgcgctgacgcgtgcgctcgtccagcgaggccgctttctgctggaacaggcggcgccgctcggccacgctgcctggcgcccgcagttcttcctgcgaggccccgggggtgccccacggtgcgccgcgctccgacttgggctgctccagagagcgggccttgcgcaggggcacccagggccgcaggggcgccggcggcgagtcgctgcgctccagggtgcgc

SEQ ID NO: 287 - DNA, 3283 bp, Homo sapiens
aggaggcggccctcgctgcgcagcgctgacccatccttgtgccaggacactgtggggaggcacagggacccggctcgccacggcccacaggcgcccactgagaatctctactcctaccccacacaccacacaggagaccaaacctctcctctcagcaccccagggaatctggaagagtccgccctcattttgggaagctcatgttgccctcccttctctcgggggtcctgagaaatgtccctgaacacacacccaagtcagggcagcccccgtggaggggataattcccctctttcccacccctcccttggaggagtccgggggaacctccccttcccttctcacacaccccctcccaacctcgaccgcaccttggcccagtgctggagctcaccttggggcggggggttggcagtgatgatacacttgagcagcacatctgcccctggtgccaccaccacattctgcagggggatctcaaacacaggggcctctaggggctcttctccagcggacacgtaggagtcatccgaagactctgccggacacaggaataacggggtaaggggccatgatccctgcagggatgacagcgggagagagagtcctggtggcctgcatcctagaaagccaaacccagacagaggggcttctagaaagcagggacttggggagaagagggtctgcctcctgaatgtccttagggaaaaaaggaagtcagaaggagcattctcgaaacaggtcagggcagccttgactccatgttagtgtggccgttcctcaacttcatccacaattagagcgttggcttctggagaaagacaggactgcactgtgtatgtctttaacacgtcagccatcatgtatggcgtaccaggccccatgcaaggcacctggaggggcacaagctttcaaacagacaaagaacaagctaaaagcaacccaagacttaagcaataacagcggtgtcacagagcaacacgaggtgaattgtcaaatgtgtgaagccgtcagattcaaaagagtgaatggtaggcagtctgagaggcctacgaagatcagatttgatttcatccgttcaccaaatagtgaccctgtactcccggcatactgagtactgtatgggtaccaagaacactagaggaaggaccagtggtccctgcttacaggaagctcatacatacagagagatgacaaactccactgtcatgggtctctgggcattctccaactctgacattccataagctagataaaggacaatgtacatagccaaaaaagcagtgaaaatcccaattctgctgtttcctagctacaaaaccttgggcaaattagcctctctgagcctcagttttgttatctgtaagatggaggggaaaagaccctctgaaactgacatataggctgaaatgaaataacatctgtaagggcctagttaacacaatgctggcacatagttgtgtgtttgcaataatggtgtccaggaggatgatggacaggggcctaattatctctaaagattctaaggtggtaatacttaaatgcaaaataattttgatgaagaaaaatacagtatggtaagtgcaatgaaagagatcctggcagggtctcccaggagcagcaggtagaggcatctattctggaggagcagtggaagtgggtcaaggacgccttcctctgcctctctccaggagtgggcctcgagttgatgtgcaggatgaggggtggggtgcagagccattctcctgttggtggtgttggtcatcatccatgggaaggttgggagacaacacacaggcaggcattgtgtagggaccacagtgagctcagccatgcggggtgtaagcctgaggtgaggaggctagaagggcaggctgggtggccacacatgggtcaggggatggtgcccgggtgggagaggcagagtaaagagttatctggcacaaagcgtgtctgtaacagggatttgaaaattatttcagaccatctaccatctctccccaacagagggattgggggtatggaggggggtccttaggttcccaccagtgcatccccccagtagtggttcttgatccaacagcctagcaggccactggacccaggggagctatggcgggcatctgggcaccagtcttagctcacatctcagcctcacctagcctccatcacaacactcacgctctgcctcaccagtagcagtcctagcacaaggactttgacaatccttcactcaaagtcgagcctgtgtctgtgccttctttggcaaacccacccttgcagctggctagcagccccaggcgaaacccccgaccccccggctcctgctgagcagtcttgctctccacaaacgccccccgacgggggttcaggcaccttgtcagccctccctgaggccttaccgagctcaggggaggtgggccgggcccggcgacctttgccctggctgcgggcccctcggcggtcccagggcccccagggaccgtcctcctccggccctctgcgaagcctcttctctgcctcaggccccgccctgttcttctccaaggtctggggtacagcagcgccctccaggcccggcgtggcccagggcaggaagcgcacggcctgcgccgggggctcccgcttccgaccggggggtgctttcgtcctggcctctgggggatcggcggcggggggcggcacagggctcctgcactcctggatggctctgctccgggtcagcgggaattggtcccgacgcctaacctcctgctgcgggccttcccccggctctgtcctgcccgccggcccgcggctcctgggcctcccaggctcgtcccccggcttctccgcgctgctcggagagggcggctgggcggcggcggggctcacggcccgcgatgtcttgggggtggagggccgagagaagagcgggggctcgccgggctctcgaggggatggggcacgctgcagcgtggcgcgcagggactcgtgcgagcgcaccagctcctcccgcgacgtggagcggcggatgcggcccagctcctgggcgaagcgcagctcgaggtctgaggccgggctgcgctgacgcgtgcgctcgtccagcgaggccgctttctgctggaacaggcggcgccgctcggccacgctgcctggcgcccgcagttcttcctgcgaggccccgggggtgccccacggtgcgccgcgctccgacttgggctgctccagagagcgggccttgcgcaggggcacccagggccgcaggggcgccggcggcgagtcgctgcgctccaggctgcgc

SEQ ID NO: 288 - DNA, 176 bp, Homo sapiens
ggccgggggtcccggcggggaccgcttcccgacccgaggggacggtggggggagcagcgcggatttggaaggaggcggctgggcagggcggcgtggggcttcgctggccagttgaggctgaaggtcgggctcctccctgcgcaacccgctctgagggacgctgctgcagaaccaag

What is claimed is:

1. An isolated nucleic acid molecule comprising a polynucleotide having a nucleotide sequence at least 95% identical to a sequence selected from the group consisting of:
(a) a polynucleotide fragment of SEQ ID NO:X or a polynucleotide fragment of the cDNA sequence contained in Clone ID NO:Z, which is hybridizable to SEQ ID NO:X;
(b) a polynucleotide encoding a polypeptide fragment of SEQ ID NO:Y or a polypeptide fragment encoded by the cDNA sequence contained in cDNA Clone ID NO:Z, which is hybridizable to SEQ ID NO:X;
(c) a polynucleotide encoding a polypeptide fragment of a polypeptide encoded by SEQ ID NO:X or a polypeptide fragment encoded by the cDNA sequence contained in cDNA Clone ID NO:Z, which is hybridizable to SEQ ID NO:X;
(d) a polynucleotide encoding a polypeptide domain of SEQ ID NO:Y or a polypeptide domain encoded by the cDNA sequence contained in cDNA Clone ID NO:Z, which is hybridizable to SEQ ID NO:X;
(e) a polynucleotide encoding a polypeptide epitope of SEQ ID NO:Y or a polypeptide epitope encoded by the cDNA sequence contained in cDNA Clone ID NO:Z, which is hybridizable to SEQ ID NO:X;
(f) a polynucleotide encoding a polypeptide of SEQ ID NO:Y or the cDNA sequence contained in cDNA Clone ID NO:Z, which is hybridizable to SEQ ID NO:X, having biological activity;
(g) a polynucleotide which is a variant of SEQ ID NO:X;
(h) a polynucleotide which is an allelic variant of SEQ ID NO:X;
(i) a polynucleotide which encodes a species homologue of the SEQ ID NO:Y;
(j) a polynucleotide capable of hybridizing under stringent conditions to any one of the polynucleotides specified in (a)-(i), wherein said polynucleotide does not hybridize under stringent conditions to a nucleic acid molecule having a nucleotide sequence of only A residues or of only T residues.

2. The isolated nucleic acid molecule of claim 1, wherein the polynucleotide fragment comprises a nucleotide sequence encoding a protein.

3. The isolated nucleic acid molecule of claim 1, wherein the polynucleotide fragment comprises a nucleotide sequence encoding the sequence identified as SEQ ID NO:Y or the polypeptide encoded by the cDNA sequence contained in cDNA Clone ID NO:Z, which is hybridizable to SEQ ID NO:X.

4. The isolated nucleic acid molecule of claim 1, wherein the polynucleotide fragment comprises the entire nucleotide sequence of SEQ ID NO:X or the cDNA sequence contained in cDNA Clone ID NO:Z, which is hybridizable to SEQ ID NO:X.

5. The isolated nucleic acid molecule of claim 2, wherein the nucleotide sequence comprises sequential nucleotide deletions from either the C-terminus or the N-terminus.

6. The isolated nucleic acid molecule of claim 3, wherein the nucleotide sequence comprises sequential nucleotide deletions from either the C-terminus or the N-terminus.

7. A recombinant vector comprising the isolated nucleic acid molecule of claim 1.

8. A method of making a recombinant host cell comprising the isolated nucleic acid molecule of claim 1.

9. A recombinant host cell produced by the method of claim 8.

10. The recombinant host cell of claim 9 comprising vector sequences.

11. An isolated polypeptide comprising an amino acid sequence at least 90% identical to a sequence selected from the group consisting of:
(a) a polypeptide fragment of SEQ ID NO:Y or the encoded sequence contained in cDNA Clone ID NO:Z;
(b) a polypeptide fragment of SEQ ID NO:Y or the encoded sequence contained in cDNA Clone ID NO:Z, having biological activity;
(c) a polypeptide domain of SEQ ID NO:Y or the encoded sequence contained in cDNA Clone ID NO:Z;
(d) a polypeptide epitope of SEQ ID NO:Y or the encoded sequence contained in cDNA Clone ID NO:Z;
(e) a full length protein of SEQ ID NO:Y or the encoded sequence contained in cDNA Clone ID NO:Z;
(f) a variant of SEQ ID NO:Y;
(g) an allelic variant of SEQ ID NO:Y; or
(h) a species homologue of the SEQ ID NO:Y.

12. The isolated polypeptide of claim 11, wherein the full length protein comprises sequential amino acid deletions from either the C-terminus or the N-terminus.

13. An isolated antibody that binds specifically to the isolated polypeptide of claim 11.

14. A recombinant host cell that expresses the isolated polypeptide of claim 11.

15. A method of making an isolated polypeptide comprising:
(a) culturing the recombinant host cell of claim 14 under conditions such that said polypeptide is expressed; and
(b) recovering said polypeptide.

16. The polypeptide produced by claim 15.

17. A method for preventing, treating, or ameliorating a medical condition, comprising administering to a mammalian subject a therapeutically effective amount of the polynucleotide of claim 1.

18. A method of diagnosing a pathological condition or a susceptibility to a pathological condition in a subject comprising:
(a) determining the presence or absence of a mutation in the polynucleotide of claim 1; and
(b) diagnosing a pathological condition or a susceptibility to a pathological condition based on the presence or absence of said mutation.

19. A method of diagnosing a pathological condition or a susceptibility to a pathological condition in a subject comprising:
(a) determining the presence or amount of expression of the polypeptide of claim 11 in a biological sample; and
(b) diagnosing a pathological condition or a susceptibility to a pathological condition based on the presence or amount of expression of the polypeptide.

20. A method for identifying a binding partner to the polypeptide of claim 11 comprising:
(a) contacting the polypeptide of claim 11 with a binding partner; and
(b) determining whether the binding partner effects an activity of the polypeptide.

21. The gene corresponding to the cDNA sequence of SEQ ID NO:Y.

22. A method of identifying an activity in a biological assay, wherein the method comprises:
(a) expressing SEQ ID NO:X in a cell;
(b) isolating the supernatant;
(c) detecting an activity in a biological assay; and identifying the protein in the supernatant having the activity.

23. The product produced by the method of claim 20.

24. A method for preventing, treating, or ameliorating a medical condition, comprising administering to a mammalian subject a therapeutically effective amount of the polypeptide of claim 11.
